United States Patent Application Publication US 2025/0380706 A1 - sequence listing, part 3

SEQ ID NO: 32 - DNA, 51885 bp, Rhizobium matallidurans
  source 1..51885: mol_type = genomic DNA
tgatggcgaaggatcgcaagctcagcgccgacgaacgcatcttgtggggcaaggtcgcgcgcagcacgcggccgatgcctggcaacaccggcgcgatgaacgaactcgatgccttcctggtcgaagccgaaaaggaagcggatgccgccaccctgaaagccgccgcgccaaagtcggccgccggcgccggcggtcagctggaaccgtcagcggcgccgaagcccgcgggcggtatccatcatccgctggagcgcccggtcaaacgcaagatcgccaagggccgcctagcgctcgaagcccgcatcgatctccacggcctggttcagagcgaagcgcacatcatgctgctcgaattcctgatgcgggcccatgaccgtggcatgcgccatgtcctcgtcatcacgggcaagggcagttcgctcggcagcgatggcgcgttgaaacgtgccgtgccgatgtggttctccaagcccgaatttcgctacctcatctcgtcttacgaggcggcggcgcagcatcatggcggcgagggcgcgctctacatccgcttgtctcgtcgcgtaggcgatcggctatgacgccgttcggggaagcgatccgcaagctgagagagcgcaagggggtgtcgcagaagcagatggcggaagcgttgaacgtctctccggcctatctctcggcactcgagcacggaaagcgtggcgttccgaccttcgaccttctgcagcgcatcgccggctacttcaacatcatctgggacgaagccgacgatctgttcctgatcgcgcgcttttccgatccgcgaattgtcatcgatacctcgggtttggcggccgagtacacgaccttcgccaaccgcttggcggggtctattcgccatctggatgaggcgacattggcaaaactgtcggaggttcttgaaaatgcggaaaacgccgacggaaaacggtcataatcccctgttttatgcgctcttggcgaccgccggcattgggaacttcatgcaaaaaccctatattcaacgtgattaaggccggtgattcgcccgcgtgtcaccacggcatcgacaacagggaattctcgacaatatgaccgatacacccgcgacggaaaacggcgttagcaccgagtatggcgcagactcgatcaaggtcctgaaaggtcttgacgccgtgcgcaagcgccccggcatgtatatcggtgataccgatgacggctccggtctgcatcacatggtctacgaagtcgtcgacaacgccatcgacgaagccctggccggtcatgccgacatcgtcaccgtcacgctcaatgccgatggttccgtcaccgtgaccgacaacggccgcggcatcccgacggacattcacagcggcgaaggcatttccgctgccgaagtgatcatgacccagctgcacgccggcggtaagttcgaccagaactcctacaaggtctccggaggtctgcacggcgtcggcgtttccgtcgtcaacgcgctgtccgtctggctgaagctgaagatccgtcgccagggcaagatccacgagatgagcttcacgcatggcgtttcggacgccccgctcaaggaaaccggtgattccggtggcctgaccggcaccgaagtcagcttcatgccgagctccgaaaccttcacgatgatcgagttcgatttcaacacgctcgaacaccgcctgcgcgaactggccttcctcaattccggcgtccgcattctcctgaccgacaagcgtcattccgacgtgcgtcaggaagaactgctttatgatggcggcctcgaagccttcgtgtcctacctcgatcgcgccaagaagccgctggtcgagcgcccggtcgccattcgcggtgaaaaggatgggatcaccgtcgaagtggcgatgtggtggaacgacagctatcacgagaatgtgctctgcttcaccaacaacatcccgcagcgtgatggcggcacccacatggccggcttccgcgccgcgctgacccgtcagatcacctcctatgccgatacctcgggcatcaccaagaaggagaaggtttctctgacgggtgacgactgccgcgaaggcctgaccgctgtcctgtcggtcaaggtgccggatcccaagttctcgtcgcagaccaaggacaagctcgtttcatcagaagttcgtccggtcgtcgaaaatctcgtcagcgaagcgctgagcacctggctggaagaacatccggccgacgccaagatcctcgtcggcaaggtggtcgaagccgccgctgcccgcgaagccgcccgcaaggcgcgtgagctgacgcgccgcaagggcgcgctcgatattgcctcgcttcccggcaagctcgccgattgttcggaacgcgaccccgccaagtccgaagtcttcctcgtcgagggtgattcggcaggcggttcggccaagcagggtcgctcgcgcgaaaatcaggccattctgccactgcgcggcaagatcctgaacgtcgagcgcgcgcgtttcgacaagatgctgtcgagccaggaaatcggcacgctgatcaccgcgctcggcgccggcatcggcaaggacgagttcaacgccgacaagctgcgctaccacaagatcatcatcatgacggacgctgacgtcgacggcgcccacatcagaacgctgctgttgaccttcttcttccgccagatgccggaactgatcgagcgcggtcatatctacatcgcccagccgccgctttataaggtgtcgcgcggcaaatcgatccagtatctgaaggacgaaaaggcactcgaggaatacctcatcgcccagggtctcgacgacgccgcgttgacactcggcagcggtgaagtgcgcgtcgggcaggatctgcgcgaggtgatcgtcgatgcgctgcgtctgcgcgcgctgctcgacaatctgcattcgcgctacaatcgcgccgtcgtcgagcaggcggccattgccggcgcgctcaacgccgaagcgatcagcgatggcgcccgcgcccaggaactggttgccgaagtcgcgcgtcgcctcgacgttatcgctgaggaaaccgagcgtggctgggaaggcggcctgacgagtgaaggcggcctgcgtctcgagcgaatggttcgaggcgtcaaggaagtcgtggttctcgacatggcgctcatcgggtcgcaggatgcccgcctgatcgaccagatgtcggctcgcctgaaggaaatctaccagacgccgccgaagctgacgcggcgcgacggtaacatggaactgtcgggtgcgcgcgaacttctggaagcggttttcgcaagcggccgcaagggcttgaccatgcagcgctacaagggcctcggcgaaatgaacgccgagcagctctgggaaaccacgctcgatccgaacgttcgttcgctgctgcaggtgcgcgtcagcgacgccacggatgcggatggtctcttcgcccgcctcatgggcgatgaggtcgagccgcggcgcgagttcatccaggaaaacgcgctcaacgtcgccaatctcgacatctgatcgctggcgttatccaaggaacggccctgtggctcaccagccgcggggccgttttctattgtgctcttatccggctacgaatttgcccttgaaggcgacttcggcgagcggcttgcgctggctggggaattcgcgctcctggttgcgttccgacagcacgctcttgtcggcaaggcgcccgaaggcaattcccgcttcgacgcggtaaccttccggaatggcgaatgtgtcgcggatctcgtcgtgcttgatgccgcccatgccgtgggcgtagaagccggaaaacttggcctgcagcgccagatagccccacgcggtgccggcgtcgaaagagtgcgtgtagctcttgcgcccctcggaaaagtcgccattgaagcccttcgacaccacgaagatgagcgccgaagcattcttcgcccactcctggttggagtccaccaggagcgatacaaatctgtcgaagtcgtccgaacccttcaacgaatagatgaagcgccacggctgctggttggcggacgatggtgcccagtgggcggcgtccagcacggtcaggaggtgggcctcatcgatgatttcgccggtaaaggcgcggggcgaccagcggtcgagaaagatcggctcgattggatattgggattcgcggctgttgctctttgtcatggtctttccgacagttggtggcggggcgccgaggtgatctcctcggcaaacgcactcttgccaccctcggagatcagtcaagatatgtgtgcaactggcgccggaaagacagtgtccgcgccgttcaatttttgccggcttttgtaatcggaccgtaccgctggcatgaaaagccgtaatgacaccggtgaataattcgttcataggtgatgaacacatggctcacgctgaggaggaaattcgatgaagctcatgcgcgttggagagattggccgggaaaagccggcgatgctggatgcggacggcaagatcagggatctgtccggtcatgtgtccgatatcgcgggtgcggcgatttcgcccgaaggtctggccaggctctcggcgatcgacccgaaaacccttcccgaacttcagccagcccgcatcggcgcctgcgttgccggcaccggcaagttcatctgcattggtctcaacttctccgaccacgccgccgagaccggcgccacggtaccgcccgaaccggtcatcttcatgaaggccacctcggccatcgtcggcccgaacgacgacgtcctcattccgcgcggctccgaaaagaccgattgggaagtcgagctcggtgtcgtcatcggcaagaccgccaaatatgtcagcgaagccgacgcgctcgactacgtggcgggctattgcgtctcacacgacgtttccgaacgcgccttccagaccgagcgcgccggtcagtggaccaagggcaaatcctgcgacaccttcggcccgatcggcccatggctggtgaccaaggacgagatcgctgatccgcagaacctcggcatgtggctgaaggtcaatggcgaaaccatgcaaaacggatcgtcgaagaccatggtctatggcgttgccttcgtagtttcctatctcagccagttcatgtcgctgcatccgggcgatgtgatctcgacgggtacgcctcccggcgtcggcatgggcatgaagccgccgcgtttcctgcgcgccggcgacgttgtcgagctcggtatcgaaggtctcggcacgcagaagcaaacatttcaggccgatctctaggcgtttgacgagtgttaagcatttgagcgcagcatcatgccggggagagaatccccggcatttctttattgcggtgcggatcgctcatgttgctgtgcaacaaaaacctgttactgtgcgttgagatgccagcacatcgttggaaagagttcgatgcctttcagcaggcgtcatcttccagatgaaagaaaggtgatgcatctcatgttttaccagctttacgaattgaatcatgccgcgatggcgccttaccgcgccgtcgccgatatcatgcggcttgcctatgccaacccgctcaatcctctttcccagaccccatggggtcggacgatggctgcggcactcgagatgttcgagcgcaccacgcgccgctacggcaagccgtcctttgatctgccgcagaccgtcgtcggcgacaagaaggtcgccgttcgcgaggagatcgtctgggcgcgccctttctgcaatctattgcatttctcgcgtaatcttccggccgcccacggtcccgatccgcgcatcctgatcgtcgcgccgatgtccgggcattacgcgacactgctgcgcggcaccgtcgaggcgctcctcccgcacgcggatatctacatcaccgattggatcgacgcccgcatggtgccgatgaccgacggtaccttcgatttcaacgactatgtcgattacgtcatcgagatgctgcatttcctcgggccggacacgcatgtgatcgcggtctgtcagccctccgtgccggtgcttgcggcggccgcggtcatggaagaggccaacgatccgttgtcgccggcgtcgatgacgctgatgggcgggccgatcgacacccgcatcaacccgaccgccgtcaaccagctggccaaagacaagccgctggagtggttcgccgaaaacgtgattatgaacgtaccctggccgcagccgggcttcatgcggccggtctatccaggcttcctgcagctctccggtttcatgtcgatgaaccttgaccggcatttggttgcccacaaggagttcttcatgcatctggtgaagaacgatggcgagccggccgagaagcatcgcgacttctacgacgaatatctcgccgtcatggatatgacggccgagttctatctgcagacggtcgatcaggtcttcatcaagcacgcgcttcccaagggcgaactcgaacatcgcggcaagctggtcgaccccacggcgatccgcaacgtggcgcttctcaccgtcgagggcgagaacgacgacatctccggcgtcggccagaccaaggccgcgcagaccatctgcgtcaatattcccgagcatatgcgcatgcattacctgcaaccggatgtcgggcactacggcgtcttcaacggttcccgcttccgccgcgagatcgcgccgcgcatcatcaactttgttcgtgaacatggccgcgcgggaaagccggcggtcaaacgcgtgatcaagggcggcaaatccaactgattcgcaatcatctgatttaatgttttgctttcaagaccttgtccgatttggccggagatcgtcttgaagccgcgtcgaacggtaaccacatcgatttccagcgttcggcattccgccgggcgcgaaaatgcgaggataccgcacgatgaaccagtcagcattgcttcgcccggattggactccggctaccattgccctgatgatcctcggcttcgtggttttctggcctctgggtctcgccatgctcgcctacatcatcttcggggatcgtctgcgcggcttcaagcgcgacgccaacaacgccgccgatggattcttcgccggctgccgacgctcgcatggccgctatcgcccgcacttcaccacgggcaatgtcgccttcgacgattggcgcaaggccgagctcgacaggctcgaggaagaacgccgcaagctcgatgaaatgcgcgaggacttcgaaacctatgtgcgcgagcttcgccgcgccaaggaccaggacgagttcgaccgctatatgcgcgatcgcaagaacacgcgccgcgatgatgacggcccggttgccgaataccaggcgccgtaaccgcgatcggcatcaaaacatctgccggcaccctcaggtgccggtttttctttgaccggactggcgacgaatcatatagaaaatgccgatgttcccgctcttgtccaagccacgcagcagcgtccgcaaaccggtcccgccggagacccgtacgctcgacgttgccggacggctgatgccgctgacgataaagcagcacgagcgcgcgacccgcatcacgctgcgcatcgagcccggcggccgcgccctgaagatgacgatcccgagcggcctggcgcgacgcgatgtcgatgccttcctcgaccgtcaccagggctggctcatgaccaagctcgcgaagttctcgaccgatgccggtcttcgcgaaggcggcacgatcctgtttcgcggcgtgtcccatcgcatccagcatacgggcagcctgcgcggattgaccgaagcgaccacgatcgatggcaggccggtgctgcgggtgagcggcatgccggagcatcttggccgccgcatcgcgacctttctgaagaaggaagcgcgggcagatctcgagcgcctggcgaaattccatgcgcattcgatccgggcgccgatcaagtcgatctcgatgaaggatacgcgcagccgctggggttcctgttcggccgagggaaacctcagcttctcctggcgcatcatcatggcgccgccctccgtcgtcgactatctcgccgcccacgaagtcgcccatctcaaggagatgaaccacggtccccgcttctgggcactgtgcgagaagctgtgccccggtatggaggatgccaaatcctggctgaagcggcacggcagcctgctgcacgcgatcgatttcgactgacaggccacggttcaaaatatcgcggcactcggaattggctcgactcacggcctttttcgtgtcacttcgctgccatgaaaccggatatcaaaatctgcggcctgaaaacggccgaagcgatcgatcgcgcggtgacgcgcggcgcgacccatatcggcttcatcttcttcgaaaagagcccgcgctatatcgagcccgatgacgccgccaggctggccgaccggatacgcggccgcgccaagatcgttgccgtcgtggtcaatccgaccaatgacgatctcgacgagatcgttgcaacattgaggccggatatccttcagcttcacggtgacgagagccccgagcgcgttttgaccataaaggccgtgtacggtctgcctgtcatgaaggcgttttcgatccgcaccgccgatgacctgaagcgggtcgaagcctatatcggcattgccgatcgtttcctcttcgatgccaagcctccgaagggatcggaattgcccggcggcaatggcgtgtccttcgattggacgttgctcagctggcttgacggcaccgtggattacatgctttccggtggcctgaacaaggacaacatcgccgaagcccttgccatcaccaaggcaccggggctcgatgcgtcctccggcctggaaagcgcgccaggggtgaaaagcgttgcgctaattgacgagtttttcgatgcggtcgagcaggcttgccggcctgaaatggcctcagggagttgatagtgaacgagaccccaaaacccaattcattccgctccggccccgatgaggacggtcgcttcggcatttacggtggccgcttcgtcgccgaaacgctgatgccgctgatcctggacctccaggcggaatgggacaaggcaaagaccgatccggaattccaggcggaactgaagcatctcggcacgcattatataggccgcccaagcccgctctatttcgccgaacggctgacggctgaacttggcggcgccaagatctacttcaagcgcgaagagctcaatcacaccggctcgcacaagatcaacaactgcatcggccagatcctgcttgccaagcgcatgggcaagacccgcatcatcgccgaaaccggtgccggccagcacggcgttgcctcggcaaccgtcgccgcccgcttcggtcttccctgcgtcgtctacatgggcgcgaccgatgtcgagcgccaggcgccgaacgtgttccgcatgaagcttctgggcgccgaagtgaagccggtcaccgccggccacggcacgctcaaggacgcgatgaacgaggcgctacgtgactgggtcaccaatgtcgacgacacctattatctgatcggcacggccgccggcccgcatccctatcccgagatggtgcgcgatttccaggccgtcatcggcgccgaagccaaggagcagatgctggaagccgaaggccgcctgcctgatctcgtggtcgctgccgtcggcggcggctcgaatgccatcggcatcttccattccttcctggatgacgccagcgtcaagatcgtcggcgtcgaagccggcggcaagggccttcagggcgacgagcattgcgcctcgatcaccgcgggctcgcccggcgttctccacggcaaccgcacctatctgttgcaggatggcgacggccagatcaaggaaggccactcgatttcggccggtctcgattatcccggcattggccccgagcactcctatctgaacgatatcggccgcgtcgagtacgtgccgatcatggaccacgaagcgctcgaagccttccagacgctgactcgcctcgagggcatcatcccggcgctcgagccctcgcacgcactggccgaagtcatcaagcgcgccccgaagatgggcaaggacgagatcatcctgatgaacctgtccggccgcggcgacaaggacatcttcaccgtcggcaagattctgggaatgggtgcataagtcatgaccgcacgtatggacaaacgctttgccgctctgaaggcagaaggccgcccggcgctggtcacctatttcatgggcggcgatcccgattacgacacctcgctcggcatcatgaaggcgctgccggaagcaggctccgatatcattgagctcggcatgcctttttccgatccgatggccgatggcccggcgatccagatggccggccagcgtgcgctgaaggccggtcagacgctgaagaagacgctgcagctcgcagccgacttccgcaagaccgacaacgacacgccgatcgttctgatgggttactacaacccgatctatgtccacggcgtcgaacagtttctcgacgacgcgctggaggccggaatcgatggcctcatcgtcgtcgacctgccgccggagatggatgacgaactctgcatccccgccctgcgcaagggcatcaacttcatccgtttggccaccccgaccaccgatgacaggcgcctgccggccgttttgaaaaacacctccggcttcgtctactatgtctcgatgaacggcatcacgggctcggcgctgccggatccgactctggtcgccggtgccgtcaagcgcatcaagaaccacaccgatctgcctgtttgcgtcggcttcggcgtcaagactgccgatcatgcgaaggtcatcggcgcctcggccgacggcgtcgtcgtcggcacggcaatcgtcaatcaggtagcactcagcctgaccaaggacgggaaggcgacagccgataccgtacaggctgtcgcaacgctcgttcgcgggctgtcatcgggaacacgttcggcgcgccttgttgctgccgaatagttttcccacattggcaagagttaatcaggagttttcgacttgaactggatcaccaactacgttcgcccccgcatcaattccatgctgggccgccgcgaagtgccggagaacctctggatcaagtgcccggaaacgggcgaaatggtcttccataaggatctcgaggacaacaagtgggtcatcccggcctccggctatcacatgaagatgccggccaaggcacgcctgaccgacctcttcgacgacggcgcctatgaagcgctgatccagccgaaggttgcccaggatccgctgaagttccgcgattccaagaaatatacggatcgcctgcgcgacagccgcatcaagaccgaccaggaagacacgatcgttgccggcgtcggcaaggttcgcggcctgaagctcgtcgcagtcgtacatgagttcaacttcatgggcggctcgctcggcatcgccgccggcgaagcgatcgtcaaggccttcgagcgcgccatcgctgagaagtgcccgctggtcatgttcccggcatcgggcggcgcccgcatgcaggaaggcatcctgtcgctgatgcagttgccgcgcaccaccgttgccgtcgacatgctgaaggaagccggccagccctacatcgtcgtgctgacaaacccgacgacgggcggcgtcaccgcctcctacgccatgctcggcgatatccacatggccgagcccggcgccgaaatctgcttcgccggcaagcgcgtcatcgagcagaccatccgcgaaaagctgccggaaggcttccagacgtcggaatatctgcttgagcacggcatggtcgacatggtcgtcaagcgtcatgacattcccgatacgctcgcgcgtgtcctgaagatcctgacgaagaagccggctgccgttgccaacgaaaacaccggcacgcttgcgatcgccgcaagcgcctgaccgcgaacatcacaggcgggttgagcgatgatacccagaggtcagaccgcggtgagcgaagcagcgcaggaaatcgacaagctcatggggttgcaccccaagggcttcgatctgtcgctggatcgcattacccgcctgcttgccgttctcggcgatccgcaaaagaagctgccgccggtcattcatgtggcgggtaccaacggcaagggctccgtcaccgccttctgccgcgcgcttctggaagcgggcggctatagcgcccacgttcacacctcgccgcatctcgtcaactggcacgagcgctaccgcatcggcgtcgagggcggtcgcggaaagctcgtcgatgacgcggtctttgcagacgccctgcgccgcgttgccgccgccaatgccggccagaagatcaccgtcttcgaaatcctgacggcggtcaccttcatcctgttctccgaacatccggccgacgcggccatcatcgaggtcggccttggcggccgtttcgatgccaccaacgtcatttccgatccggccgtatcggtgatcatgccgatctcgctcgatcaccagccctatctcggcgatagcgtcgaactgatcgcggccgaaaaggccggcatcatgaagcgcaaatgcccagttgtgatcggcaagcaggaatatgacgcggcgctcgacgtgctgatctccaccgccgagcgtctcggctgcccgacggccgccttcggccaggatttcatggcgcatgaggaatacggccggctcgtctaccaggacgagtttggcctcgccgacctgccgctgccgaggctccccggccgccaccaatatgccaacgccgcagccgccatccgcgccgtcaaggccgcgggcttcaccgtcaccgaagcgatgatggagaaggcgatggcctcggtcgaatggccgggccgcctgcagaagctgagcgatggcaatctgatggcaagcgccccctcgggtgccgagatatgggtcgatggcggccacaatcccggtgccggcgaggtcatcgccgaagccatggccaatttcgaggaaaagcagccgcgtccgctgttcctgatcatcggcatgatcaataccaaggacccgatcggctatttcaacgccttcaagggcctggcggagaaggtctactgcgtgcccattcgcggcagcgacgcgatgatcgaccccgtcattctcgccaacgccgcctatgacgccggtctcgtcgccgaaccgatgtccacggtcggcgaagcgctggaagcgatcggggacaccgccttcgagcgggaacagccgccgcgcatcctgattggcggatcgctctatcttgttggcgacgtacttgccgacaacggcacaccccccaaatgaaaaaagcccggcatcgaccgggcttttttcattctaatgtcctgaacgatcaggcagcgctggaaatccagctcgaaagagcggtcttcggagcagcgccaaccttgatgtcggcaacttcgccggccttgaacatggcaagcgtcgggatcgagcgcacgccgaactgggcggccagctcgggattttcgtcgatgttcagcttggcgaccttcaccttgccctggaactcgacggcgagttcttcgaggctcggagcgatcatcttgcacgggccgcaccattcagcccagaaatcgacaacgacgggttctgcggattccagaacttcagcctggaaattattgatatcgactttcacggtagccataaggccgctcctttgaaggattcctgttgaagcacatgtgatggtgcgccggcgggatttcaatgaccggtatttcactttgtcttgagctgtgcaagcgccaatgccatggcctcaggcgtcagcgtgtgcacggagccgttctcggtatagaccagtacgcagtcgatccgcttgccgggatagagcggcgccatgatcgtctggtagatggcaagctgcgcccgatgggcgaagggaatggtcgccgccgtatccggcggcacgcgattggtcttgtaatcaaggatgaccacccggtcgtcgagcaccgccagccggtcgacacgacccgaaacggcatagtcacgcccgtcaagcgcaagcgttcccatgatcgacacttcggcctgcgcatgggcctcgaacaccggctgcagatcaggcacgtccaatagtttcagaaccgaatcgatcagcctgtcgcgctcattctgcggccagaaacgggcggcgcgctcggcatagcgcctggcagcgtccgctcgttccaccagtggtatctccggcaaggtctgcagcatccggtgcagaagccggcccttttgcagcgcccggtcggatttcggcttgtcggtaaacagcggcgaggccacgagaagattgtctgcctcctcgtcgataatcgttccggccccggaagggctaaggggtcgagggagcttcttttgcggcggcagcgggcgattgaggtcaaacggcaaggcatcgcgggcagcagcctgctcgacgtgatcggcgcgctcgaacatccgctccatcgtcggtacgcgccattcgacaccctgccagtcgccatccggcccggtaaaggtggcggcttcgacatgcggatggctgtcgtccatcgcagccgttatcatcgcatgccaggtgtcggtgttgagccgcacacccctatagccgcagacgatcaattggtcagcggcgcgcgtcatcgccacgtagaggagccggcgatattcctcttccgccagcacttggatacgcgcggcatcggcctgcgtcagcgaattgctgagatcgccgagcggcacccagaccggcagcggcggccggtcaccactctgctccaggagccgcagcttcggcatatgcgaatgcgtgaacgccttcgagccgccatcgaccagaaacacgatcggcgcttcaagtcccttcgaggcgtgcacggtcatgatccggacctcgttgcggcccttgtcctgctcgcgcttgacgacgggcgcctcgagctcaagtgtcgagatgaacgattgcaagccgggcagggcggccgtctcgtggtcgagcgtgaaggtgagaaactcgtccagaatgtcgctcgcctcggtgccgagccgcgcgagaaattggcgtcttccgccatgaaccccaagcacccgggcgtagaagtcgtgaaccggaaggctcctcgattcctcaagaaacagctggagccgagtaacgacagcgccaagacgctcattgccatccgccgcataggcctgaagatgcgcccatacgctttgaccgtcgccacgcagcgccgccaccgcgaagatgtcgtcttcactgagatcgaatagcgggctcttcatcagggccgccagcgataggtcgtcttccggcagaagcaggaagcggccaagcgcgaccagatcctggatcgcgatgtggctggtgagccgcagccggtcggcaccggcaaccggaatattgccgcgtcgcttcagtgcgcgcgtgagcgcattgacgaatgcgtcacgcttgcgcacgaggacgagaatgtcgccggcctcgatcagccgctccttgcccttctcgatgatcgtcttcttgccgaccatcatgtcgatcgtatgcgccatgcgccgcgccaggatggcggccggtgcgctttccggcgtcgcatcgaacggcgccgtccagtcctcgtccttggtcgcgacctcaggcgcgatcatctcccataggtcgacggcgccggggtggccgatacggttggagcggtgcaccaccggctcaccgccggcgctcagtccgcgcgcattgtccggcggggtgaagatatggtcgacggcggcaagcacgtcggaggtcgatcggaaagagagcggcaatcgaaccgaggagaaatcccggccgctctgcgacacgcgctgccgcgtgcgccggctttcttccgagaaacgttcgggccgcgcgccctggaacgaatagatcgactgcttctcgtcaccgacggcaaacagcgtgcgcaccacgtcacgcgcgctttcgccggagaagaaatcctccgccagcgattggatcacgctccactggatcgggctggtatcctgcgcctcatcgacgagaatgtggtcgatgccctgatccagcttgtagtggatccatggcccgacatcgctcttgttcaggagatcggcggtgcgggtgatcagatcctcgaagtcgagctggctacgctgcttcttgaggtcgtcgtagtcgcgattgagcctgtcggcgagcacaagggcagcgcgcgtcgcgtcgaacatccgcacgatcttcagccggtcacggcaggagaccacatgcgcgcgcgccgcggcaatcgcgtcgccaagctccggcgcctgggcgagcatcgccttcacggtgaactgcccgtccgacttcggttcgcccttgccggtgagaaagatcttttccagcgttggaatccggcgaaggacatccgtttcacgcaccacgctcttcagcgcggaagccacgtcctgcgccttggcgccgcccttgctgtcggcgagctccaaataaaggctgagcgtaccgccggccaaaccgggcagcggccagtattgcccggcgattgcaagctccgtgtcaccttcggagaggccaagctctgcgcgcaagacattgtcgaggccgccattctggtcggcggcctgggtgaaagccttgatcgcattgcggttggcgacgatttcaccaagcagcgtttccagcccggattcgtcgccgaggttgagaacataggagaaggcgtccgcgagcgccctgtcttcctcgggcgtcgtcgccgtcagcagcgagcgccgcgcgtcggcaagcagtgtcgcggctgcccggtcgtcgagcacggaaaagtgcccggctacgttcgcctccagcggaaactggtgcagcagcgcttcgcagaaggcgtggatggtctggatcttcagcccgccaggcgtctccagcgccttggcgaaaagccggcgcgcctccgcgagcttgaggatgtcaggcggcgtcccctcgatctgggcaatgcgcttgctgagctcctcgtccgagagcacagcccactcggccagccgatcgaacacgcggttcgacatttcggaggccgccgccttcgtataggtcaggcacaggatcgccgaaggccgggcacctgatagcagcagccggatcacccgttgggtcagaacgtgcgtctttcccgatccggcattggccgacacccaggccgatcggcgcggatcggatgcgatcgattgctgcaccgtcgtccagctggtccagtcgtgcgggtcgtcgccctcagggagcgccgtttcgtcactcatcattgctggcctcgtcgctttcggccgtcgaccattcggagacgcgggcgaggtggtcatagtcgccgccgaactcgaattgctgggcgggaataagccgcgaggtgaaacccttctcgccggattgcagcagggccacgaatttcaccagctggtcgatcgaatcgccggcaagttcgatcgccgattttgccttgtcgctgcgcgccgaaaattcgttattgacggtatcgacctggaaccggctccccggccgcagcctgacatagagcaggtcctgcggcaccagcttgcccgcgtccatgaagccgccggccttcagcacttcggcctccagcgccagctgcggatcgagcagcgcccgcgcttgcgcgggcgaggggttgtagcccgtcttgtagtcaatcagatcggcggaatgcgggccggtaacgtcgatccggtcggcaacgccgctaagccggatatcgacctgctcgagctgcatggcgccgcgcacttccgtcagcgtccgctgcagccccggccgccgctccgcttcccaggcgaggaaggagcgcgccacctcgcgaaaacgcggccgccagacggcatcgatatgcgccggcagctgctccatgtcgaacagctcggtaaggatgcgctccatcgccgccgtcccatcgggcgtgccggcgatgttgccctcgcgcacgaaccggtcgatgatcttgtgatagagcgtcccgcgctcggcagccccagggtcgcggttgaaggcatcgacggcgtcgagcttcaaaacgcggcgcgcatagatcgcataggggtcgcgccgcagccggccaacctcgctgaacgagtaggatttcggctgcacctcgcgcggcggcgtcgggcttggccgttgcgccggcgcttgccgctggccctcgtcgagcaggcccgcccagtgcacgaactgctctccccgatccttcagcgtggcttcgaaattcttcccgcaaaaggccatcagccgctgcagccagcgcgaggcgacggtgggcgtcgagcctttgcgcagcgccctggtataaacgagatgccgcgttccgttggccatctcgaagtcgtgcgccagctggccgatacggcgctccggcggctcaaggccgatctcggtcttcatcgaccgcgagatgaagggattgttggccgtctggcccggccatgagccctcgttcaaaccgccgaggatcagcgtatcgacgctctgcaggcgggcttccagcgtgccgaagatgaacagtctcggatggctgagcgcttgcggcttcaccgcctgtccggccgaaagcgccgccatgatatcgatccactgcgccccgtccgcctcgatctggccgtcggtgccgatcacctcgccaagcaatgtcgccagcgtatcgcccgcctcgccggaccacagcccggagagatcacccttctcgtcgcgtgcgaccccctcgatggcgcggccggtgcgatcggcccagtcggagagcgtgaagcgcgtggtgaggccgcggctagcggtgtcgtggcgcacgagagcggaagcgagcggctcggttgcctcgccgaccctgcgggcgagatcgcgcgccagatcgaccgcgtggataggaagcgccttgcgccaatgcggcgcatgtcggtcgagcgcctgttcggagagctggtgttcgagcagcggcccaagcgcgctgatatcgacctccgccacgccgccacgcaaggccagcaattcgagcgccgccacggcctctgaaagcgcgccgcgctccagcccgaagcgcgccaggggatgcttcagaaggctgacgatcgcgaccggatcgcccggtctcagtgctgcttcgagcaacagctgcagcaaggttccctgcgacatcgctgcaagcggcgtgccggcggaatcgtcggcgacgatgccgaagcgagacagctctgccatcacgcggcgggcaagattgcggtccggcgtaatcagcgccgcgcggctttcgccgtccttggccgcctgctccaatgccagccgaagcgcaatggcgatcgccgtcgcctcttcgcgctcattacccgcttcgatcagcgatacgtcggcgaaggccgccgcgatgtcgctctccgaaagcgtttccttccaccggctccagtcgctggtcgcctcggatggcgacagcgcatgcgagaggatctgcgcgcgcaccgcaagcgcgtcgggcgcgctcgcaagcgtcgaaacatcgtcgcgcgtcaggctcaggcgcttcaaaagctgcgccaggccatattgcgaatggctgcggctcgcggcatcggccatgtcgggggcgaccatccgccagtgctcatccggcatgccgacatcgagacccggcagcacgatcacgccctcgcgccgcgccgccaccgccgcgatcaggtcggccgttgccggcaccgaaccggtcgagccggcgatgatgataggcccgctttccggcatcgtcgcgatccggttggcttccgccctcaggatcgcgttacggtgccgcgccggcgaggatttaccgagctcgttcaggcgttccggccaaaaggcgctggcgatctgcaggaactccgccgtcagctgccaccacagcgcatgatccctcgcgctcagcgtcgcaagttcgctccagtcgcgatcctcggtctcgatggaatcgatcagctcggccaggttcctggcaagccagatcgcgtccgccgggctggcgggtgcgacgagcggcgaatcggaatggatgctgcgcacgatgtcaggcagcttgttacgccaggcgaggatcaaccgcgcaagttccaaaagccgcgcggtgttcgatagcggctgcgcgagatcgagcgtcgtcggcagcgcttcgtcgaaataaccgctgtcgtcatccgtctcgccaagcggccggatgatcggcaggatcgcggagcgaccgccgagcaggtcgacgaactccgagcgcagcacgcgcaccgcgcgccgcgtcggcagatagatcgtcaccttggagagcgacagcggatcggcggggtcgtggcgaaacagaggcgtcagccgtccgtcgcagagcgtctcggccaaggtcgcgagaaagggcagccctgccggtattgtcagaacgctgggctggtgccgctcgctcatggcctacgccaacgcccggtaacgccggatcgtctcttccgcatcgccgatcgcctcgggcgtgccgacggtcagccaatgcccttcgagcatcatgccgtaaagccggccgcgcgcgatcgccttgtcgaaatagatgttgagattgaaggcgtcatcaggcgcgtcgtcgagaaacgcggtctgcatggcaatcgccccggcatagaccacggggtccggaccatcggcacgaacacggctcagccggccggcctcatcgcggttgaagtcgttcttgccgttatgcccggtcgtgtcctggagattgacgcacagcatcgccatgtccatcctgtgcgcatcgaagaatccggctaagcgccgcagattgctcggccggtccggctgctcgccgatccagaacagatcggcatttgtgacgagcacggggccgcgatcgagcagcttcaagcccttcgccagaccgccgccgttgttcatcaggccagcgcgctcgtcggagatgatgatctcgagcgccttgtagcggctgagatggtcgagcatctggtcggcatgatggtgcacattgaccaccgccttctcgacgcccgcttcggcgagcgaatccagcgcatagtcgatcatggccttgccgtcgattttcaccagcggcttggggattgtatcggtaatcgggcgcatgcgggtgccgagaccggcagccagcaccatggcttgtttgatggtcatatcgtccgaaacttatgattcgctggtgactattccagtccttacgcaccacgcgcgcaagggggcaagcgtttcatgctgaagcgccacgctcaaataggagagcgtgcgcggcatgtgcttcatatagcctggttttccgtcgcgccgcatcagccgaacccaaagcccggccagcttgcagttgcgctgcgccgacatgatcgcccagcttttcaggaagcctgcctcgtcgaagccgccctgcgcgcggcgcagcgacaggtagtgttccatcagccggtcgaaaagatcgggctcgatggtcacgcgcgcatcctgggcgatcgaggcgagatcgtaggccgtcggcccgatcatcgcatcctggaagtcgatcaggccgacccgctttacgccggcctcgtcttcccgccagatgatgttcggggagtgaaaatcgcgcagcagcaggttcttctcggccatgtcgagctggtcgatcagcgcgtcccagatcgcgaggtattcatcgcgctccgcatcggtcaccggcgccgcatcgcgtttccacggcagatgccagtcgagcaccagacgtacttccattttcatggcggtgcggtcgaaatccgggatgtggtgcacatgcgcgtcggtgacgcggatatcctgcgggatcgcctgcgcatgcagggccgcgaggcatgcgacactctcaaggtagcgctcggcgatcggctggccgctctcgtcgagaaccccatcgctgccgaggtcttcgatcagcaggattccctgctcgtaatcgacctcgtggatcaacggcgtcgcgaagccgcgctctcgcaagttgtctgcgatagcgacgaacggataggcgttctcggcgatgtgcgccaccttcgggtagggcttgccatcgagcaccggcgggccttccggcagtggcggccagtccatcaggatccggcgcacaccatcgtcgggatagatcgcctcataggcccgaagcgatgcgtcgccggtcagaaaccggcgcttggcgagcgggtatccggcagcagaaagaaaggcgcggatggcgagcatgcggttgatccgtgcggcctgcttctcgggtgccgcgatcgtcgcccggcgtccagtgccctcatgcgtcagcgtcagcacgatccggtcatccggcagctcgctctcggccatctctggccattcgaccagacagatgccgctctgcagcgcctcgtcgaaacccagttcggtcagttcggcggcatctcccagccggtagagatcgaaatgcgcgacgggaatgcgcaactcgtaggattgcacgagcgtgaaggtcgggctcggcacttccagctccgcgtcgtcggcgatcgcgcggatcagcgcccgcgacagcgatgatttcccggcaccgagatcgcccgacagcgccaggcagtcgcccgccttcagcgccagcgccagatcctcgccgagacggtcggtcgctgcctcgtcttcaaggaaaagcgagatgacaggcgcgcttgtcgtcattcggcggcggcgtaggaggggaggttggccgaaggaatccggcaaatgaccgtcgttcccttgcccggctggctgtcgatgacgacctggccattatgaaggttgacgaagctgtcgacgatcgacaggccaaggccggcaccgccgcgcttgccgctcttggcgcccgtcgcgaagcggtcgaatacggtcgagatcatttcctgcgaaatgcccgggccttgatcggtcacgctgaagacgaaatccgttccctcgcgctggcaggcgagcgctatcgaagcgccctccggcgagaaattcgcggcattggagagaagcttgaccaggatctgcttcaggcgctgcggatcggcgatgatcgatccgagccgcgccggcgcggtgatctccagcgtcacgccgctttcctgcagccggtcggcgatctggatcgagacgtcgtcgagcaggtcgccgaggtcgatctccgaatagttcagccgcatgatgccggcatcgacggtcgcaagatcgagaatgtcgttcaccagcgtcagcaggaccgacgaggaggtggagatatggtcgatatactccgcctgccgctcgttgagatcgccaagccccggcgtgcgcaacaggtcggtgaagccgatgatgttggtcaacggcgagcgcagttcgtaggagacgtgctgcacgaaatcgttcttcagttcgtcggccttgcgcaatgcgtcgttcttttccgtcagcgcgcgttcggcgcgcacgctgtccgtcatgttgacgaaggtcagcatcgtctgcgcgttcggcagcggaatgaccgcataatcgagcacgaggccggagaacagctccagcgttccctggctcgagcgacgctcgtcgtcgaagctggtgatcagctcggcgaaggtcttccagccgtcgggccggtcgtaggatggcgcgcaggcatcgcccagcgtccggatatgggtgcccggcttggcttccgcctcggtgatgccccagagcgcccggaacgcagggttcgacaggcgaatgcgcccgtcggggccaaacaccgccacgccttcggaaagatggtcgatcgtctcgccctgaaccttcaccagcgtgttgtagcgcgtctcgagatcgacctgttcggtcaggttttcgaacacccaggtggcgccgccctgcggatgcgcggtcgcgaagacgcgcagcgtctggccgttcggcaggtgccagaggtcggattgcgtatcgagtgcccggtagaccgaaagcgccgtctccttccaggtcttccagctcagctggtccggcagcttcttggcggcgcgcagacgctccagaagctcggcattgtcgggcttgctctcgagaaacgcgatatcgagctgccagagcgaaacgaaagcctggttgtagaactgcagccgctggtcgccgtcgaagatcgcgaccggggtggccagatgatcgagcgtctcggcgtggctcttcagcgtccgctccagctcggcgcgtacggtctcgatgccggagacatcgaccgcgatgccggccgaaccgctcggaaccctgacgtcgacgacgtcgaggaaggtgcggttgccgtggataacggtcgagatcttgtcgtggaacggggattcgggcgtggcgacggcgcggatgcgctcgcgcgcgatggtcgtcaggatttcgcggccctcggcgattgcctcgtcgggcgacgaggcatcgacggcggcgccgtaagcatggttcacccaggtcagccgaccctcggtgtcgcgctgccatgccggcaggtcgatggaatcaagcaggccctggaacgccgagatcgacgacatcagccggtcgcgctcgatcttcagttctgcgagctcggcgcgcagattgttgagcgccacgaagcgaacgaaggcgcggccgccggaaacccggccctgtgcttccagaacctcttcgcggtgggtttcgacgacgatgtcgaagctcttggcggactgccgcaagccgtcgatcgcgcggtcgagctccgatgccgagcgtggtttcagccagaggccgaaggccagaaattcattgtcctgcggtgcgccggtctcggccggcagctgtcccagcagttcggggcgctcgtcgccgtcccagatcacgatgcgccggttcttgtcggcgatcagtgcctggtattgcgaaatgcgctgctgcgcatccgacagcgcggagcggatctcgcggccctcgctctcgagattgccgcgctggcgcacgacccagagtgtggaaagcagggcggcggagatgacgccgatgacgacggagaagccgacgacctgcgtggaggtgaaaagatgcggagacgcggcagcctctgccgcctgtgcgaaaaccggatgggcgatcgacgccattgcggtccccgcagcaaagatccttgccacctgagccaacaagcctgatcgctgcgccgaagccctgggggcgtcgacgggttttccattgcctggttggccagcgcagcaagacgggtaaacgccgtcttctgcctgtttgaccaggcggtgcatcatttccgacatgcgcggtatgtctccgtccttttgtgccgcattacgacaagacatcccattttcgtagcaaacggacgcgtccgtctccacgaatcgagtgttaaaacaatacttcggataggaatcgtcgggaagatgtgtgccaaaaaataagggtgcggcatttgtcaatgccgcaccctctagatgttgtggatatcgaatccgctattagtatctgtagtggtcggacttgaacgggccctgcggcgtcacgccgatgtaggatgcctgttcttccgaaagctgcgtcagcttgacgccgagcttggcgagatgcagacgcgcgaccttctcgtcgaggtgcttcggcaggatgtagacctggttctggtactggccgggcttggtgaagagctcgatctgcgccagcgtctggttggtgaacgaagccgacatgacgaaggacggatggcccgttgcgttgccgaggttcagcaggcggccttccgagagcaggatgatgcggttgcccttcgggaactcgatcaggtcgacctgcggcttgatgttggtccacttcaggttacgcagggctgcgacttcgatttcgttgtcgaagtggccgatgttgccgacgattgccatgtccttcatcgcgcgcatgtggtcgatgcggatgacgtccttgttgccggtcgtggtgatgaagatgtcggcggtcgagacgacgtcttcgagcgtgacgacttcgaagccgtccatggcggcctgcagtgcgcagatcgggtcgacttccgtgaccttgacgcgtgcgccggcgccgagaagcgaagcggccgaacccttgccgacgtcgccgtaaccgcagacgacggcaaccttgccggccatcatcacgtcggtaccgcggcggatgccgtcaaccagcgattccttgcagccgtacttgttgtcgaacttcgacttggtgaccgagtcgttgacgttgatggcggggaagggcagcaggcccttctgggagagctggtaaagacggttgacgcccgtggtggtctcttcggtcacgcccttgatcgcatcgcgctgcttggtgaaccagcccggcgaagcggcgaggcgcttcttgatctgcgcgaagaggatctcttcttcttccgaatgcgggttcgacagcacgtcttcgccggcttcggcgcgggcgccgagcaggatgtacatggtggcgtcgccgccgtcatcgaggatcatgttggagaggccgccatcggcccactggaagatcttgtcggtgtagacccagtagtcatgcagggattcgcccttgatggcgaagacaggaacgccggaagctgcgatcgcggcggcggcatgatcctgcgtcgagaagatgttgcacgatgcccagcgtacttccgcgccgagcgcgaccagcgtctcgatgagcacggccgtctggatcgtcatgtgcagcgagccggtgatgcgcgcgcccttgagcggcttcgatgcgccgaactcttcgcggcaggacatcagacccggcatttcggtttcagcgatcgtgatttccttgcggccgaagtctgcgaggccgatatcggcgacgacgtaatctttttcagtgctcattgggttctccatgctgaaagcgtctcagatgcgaaggcgcgaaacgaggtcgcgcgacgaaaagctccgcgcaggcgcggtcatgccagccgtttagcaggcttctatgacgaaggcaataatgatataaagaagtctttatatgtttatatggtcctgaggaccttacatatcttcgccgaacttgttctggatcagctgatccagcgcgtcgagcgcctgtgcggcctggttgccgctggcggagacgacgacgctcgagcccgggctcgccgccagcatcatcagtcccatgatcgagttgccgccaaccgtcatcccatccttggagaccgtgatggaagcgtcgaaggtttcgaccgtctgcacgaatttcgccgaagcgcgcgcatgcaggccacgcttgttgatgatcagaagttcgcgggacagctggacggtcataggggctctttacttgccgctcaaaacgcggctggcgacattgatgtatttgcggccggcttcggatgcctcggcgagcgccttttccatattgtcctcgccgcgcacgccggcgagcttgatcagcatcggcagattcatgccggcgatcacttcggtatggccgctgctcatcacggaaatcgccagattggaaggagtaccaccgaacatgtcggtcaggatgaccacgccgtggccatcatcggcatttgcaaccgcgcccagaatatcctggcgtcgctgatccatgtcgtcttcggggccgatacagaccgtctcgatgaatttctgaggaccgacaacatgttcgaccgcatgacgaaactcttcagccagcttgccgtgtgtgacaagcacaagtccgatcatgatactactgctcccaatggcgtatgcaaacggtaggcccaatatcgcaacgcagcaatcgcgtccaccgtgggggcacatcttggctatgaaaagccgaagtgcaagacaaaaatgcacggtttcgcgcgccagctgccggtttcgtaggcactagcgcccgatttcgggtgctttggccatcagcaccgccagcggcagcggcacgttagccagcaaccgaatgacgggcagcacgatgccgggcgagacggtcgccctctcgtcttccggcggcagccggtcttctcccgaagcgcgccctggaaggatcgcataatgcatggcggcttcccgggtgaagggaatgcggacgatgccggttccgcgcagctcgatcatgccctgtatggagggcgggcaggccgcgatcgcgaccgcgtcgcgtgccgagatcatcacctgatcgtcggcgaccagcatggcatcgatgccgatccgcttcgcctccgcaagacaggtaaaggcgagcatcgacttgccccatcccgacggcccgatgaagagaagtccggtcttgccgacgacgatcgccgtcgcgtgaatattgaccggcgccgcggtcatgagttgggatctgcgggcagcgcaagcgtgaagcgggcgccgaccacctcttcggtctccgcgtcgatgatgttttcggcgcgcagcgagccgccatgcgcttcggcgatctggcggctgatcgaaaggccaagcccggaattctggccgaagccttcggactccggcctgtcggtatagaagcgctcgaagatgcggtcgatgttctccgcctggataccgggaccgttatcctcgacatagacgatgcagcgcgagcgggtgcgaaccagacgaacggtaatttttccgtcttggtcggagacgaaggagcgtgcgttctcgatcagattggtgacgatctggccgatgcgcaggtcgtgaccgttgaccaggaagcgtgtcttgacgccgggcttgcgctcgatcgcgaattcgatctgcacttccttcttgcggttgcggatctgacgcgagatttccacgagatcgcgaagcaggacctccagatccaccgatccggcatcgacgcgcgcaagttcggcgtcgagacgcgaggcgtcggaaatatcgctgatcaggcggtcgaggcggcgaacgtcgtgctggatgacgtccatcagccgcttcttggagtcgtccgattttgccagcggcagggtttccacggcgctgcgcagcgaggtcagcgggttcttcagttcgtggctgacgtcggccgcgaagctttcgatcgcgtcgatccgatcgtagagcgcggtcgtcatgtcgcgcagcgcgatcgacaggttgccgatctcgtcctggcgaaccgagaaatcggggatttcctcgcgctccttggagccgcgacgcacgcggatcgccgcggccgaaaggcgacgcagcggattggcgatcgtcgacgacagcaccagcgacaggagcacgttgaccagcgtcgccacgccgaagacgcgcatgatgccgaggcgttccgcatggacgatattgtcgatgtcgccggcctgcgtcgacaagagcagcacgccgagcacggcgcggaagcgctggatcggcacggcgacggaaacgatgagctcgcccttttccgtggtgcggaccacggcgccgcgcacgccggtcagcgcgttcatgacttcagggtagatcgagccgtcgccacccggcgcttccttgtagagcggcaggttgcccggttgcagaaccttgttgaagatcgtcgtgaaccattcgccccaggtctgctcctcgtcggcaaccggcggaaggtcgaagcgcagcacctggccgcgcgaatagaggtggcgcgagtcgagcaaaaggttcgcgtcggcatcgaagatgcgcgcgcgggtgcgggtcggcgagatcagccggcgcagaaccggcgcgaccttctccggatcgatcggaaattccaggtcctcgtcattcggaaccggggtaatgctctggccggcctgcagctccagaagcttttcgggatcgatggtgatcgaattggtatcgaccgaggcggaagccgagacggcgccggcgatgatttcgccctgcgtcagcaggctttcgacgcgggcgtcgatcagcccctcgcgaaactggttgagatagagaatgccgcccacgagaacgacgagtgccgcgagattgaagaacaggatgcggcgcgtcaggctggaaaagacggcgttgccgaagatacggcgaatgatcgtgaagggatgcgaccagcgtcgtccccggacgcgtcggcctacgccgtctgcgtcatccagatccttctcctgcaccaactgtgccaacgacagccccttcgaagagcgggccgctttggcggcgccggctctcatatacttttatccgccgcgccgctttggcgtcaggctgcttcgcggaagcggtatcccactccgtagagcgtttcaatcatatcaaagtcgttgtcgaccatcttgaatttcttgcgcagccgcttgatgtggctgtcgatggtgcggtcgtcgacatagacctgctcgtcataggccgcatccatcagcgcgtcacggcttttgacgacgccggggcgctgcgccagcgagtgcaggatcaggaattcggtgacggtcagcgtcaccggctcgctcttccaggtgcaggtgtggcgttcctggtccatgacaagctggccgcgttcgagcgaacgcgcgagctgtgcggcgccgggcttcggcgcggcgccggtggcggcagctgccgctgcttcccggccggcggcgcggcgcaggacggcgcgcacccgctcgaccagcagtcgctgcgagaacggcttggtgatgaagtcgtcggcgcccatcttcaggccgaagagttcgtcgatctcttcatccttggaggtgaggaaaatcaccggcatgtcggatttctggcgcaggcggcgcagcagttccattccgtccatgcgcggcatcttgatatcgaagatcgccagatgcggcgggcgggcgagaagaccgtcaagggccgaggcgccatccgtgtaggtctcgaccttgtatccttcggcctcaagcgcgatcgacaccgaggtcaggatgttacggtcgtcatcaacgagcgcgattgtcggcattgtattcgtctccgtcatctaatgcgcgtctccaggttttttgaaggtccccaggcggccatatgaaccggatgcgcttatggggataaaggtggaacaaattgtggcaaagataaagggcgcggcggccgctaatttttgcggacaaccgaaagtcgtgcgagaaaattggtcgcgccaagccggttcaaacgatttaaaataaggcgcttaaatttaaatcgattaaatatctgatatcattaaataatatcgatttatgccacttgcgttttaaaaatcctgtccgtaggttcgcgctcagttcttaacggcgttgagccccaagggaaggaaatgaccatggagcagttcggtactcacaacccagcgatagagctggcgacggcaggtttctcgggcgcgaagagcgttcgctataacttcaccgccgcctccctctatgaagagtcgattcgccggggagaagccgaactcaccgcgcacggcgccctgcgtgcgctgaccggccagcacaccggccgttcgcccagggacaagttcgtcgtgcgagatgcaaacaccgacggcgagatctggtgggacaacaacaagccgatgtcgccggagcatttcgcgctgttgaaaaaggacatgctggcgcacgccgccggcaaggagctcttcgtgcaggacctgatcggcggcgccgatgaagcgaatgcgttgccgacccgcgtcgtcaccgagcttgcctggcactcgctgttcatccgcaatctcctgatccggccggagcgttccacgctggaaggcttcatgccgaagctcacgatcatcgatctgcccaccttcaaggccgatccggagcgctatggctgccgcaccgaaaccgtcatcgcctgcgacctgaccaacggcgaaatcctgatcgccggcaccttctatgccggcgaaatgaagaaatcggtcttcacggcgctgaactacctgctgcccgccaggggcgtcatgcccatgcactgctcggccaatgtcggcccggatggcgatgccgccgtcttcttcggcctgtcgggcaccggcaagacgacgctttccgccgatccggcccgcacgctgatcggcgacgacgagcacggctggggcgaggacggcatcttcaatttcgaaggcggctgctacgccaagaccatccgcctgtcggccgaagccgagccggaaatctacgcgacgacgcagcgtttcggcacggtgctcgaaaacgtcgttctcgatgaaaaccgcgtccccgatttcaacgacggttcgctcacggaaaacacccgttgcgcctatccgctcgatttcatcccgaacgcttcggacaccggccgcgccggccatccgaagacgatcatcatgctgacggctgatgccttcggcgtcatgccgccgatcgccaagctgacgccggatcaggccatgtaccacttcctgtccggctacaccgccaaggtcgccggcacggaacgcggcgtgaccgagccggaggcgacattctcgacctgcttcggcgcccccttcatgccccggcacccgtcggaatacggcaatctcctgaaggagctgatcggccgccacggcgtcgaatgctggctcgtcaacaccggctggaccggcggcgcttacggcaccggcaagcgcatgccgatcaaggcgacgcgcgcgctgctcgcagccgcgctctcgggtgaactcagcaaggccgacttccgcgccgatccgaacttcggcttcgccgttccggtcgcggtcgaaggtgtcgaaagcggcattctcgacccgcgctcgacctgggccgacgctgcggcctacgacgcgcaggcgaacaagctggtgacgatgttcatcgacaatttcgccaagttcgaaggtcacgtcgacggtggagtgcgcgatgcggccccgggttttcgggtggccgctgagtaaatcagcgacaactgattgatgattcacgtgaaacccggcccggagcggccgggttttgcgcgttttgaagcgcctttccaaccgggagacgatgtgagatagacatcacatggccagcgacccgctctatatcaacgacaggatcaccatctcaggatgggaactaacggaacagttcgttctggcgggcggtcccggcgggcagaacgtcaacaaagtctcgacatcagtccagctgttcttcaacatccagaattcgccggcgctgaacgagcgtatcaagagcaacgccgtgaaactggcgggtcgtcgcatgtccaaggagggcgtgctgatgatcgaggccagccgcttccggagccaagaacgcaatcgcgaggatgcgcgtgaacggctgaaggaactgatcctcgaggccgccaagccgccgccgccgccgcgcaagaagaccaagccgaccaaggggtcggtggagcgccggctgaaggccaaatccggccgctccgacgtcaagaagatgcgtggccgcccgagcggcgaataggtgaggggagggcacgatgctgcagttgtcgaacggcattcgccacagcccggactatctgagccgcccccgccgggaagcgctggttggcatcatccgcgagatcgtcgcgcaagcgccgctctacactccggtcatgccgggcaccggcaagcccatgtcggtgcgcatgaccaattgcggctcgctcggctgggtcaccgacaaggagcgcggctaccgctaccagccgacgcatccggcgacgggagagccctggccggaaatcccggccgaattgcttgatatctggaatgacgtttccggctacgacaagccgcccgaggcctgtctcgtcaatttctatgccgacgatgccaggatgggcctgcatcaggacaaggacgagcaggatctctcggcgcccgtcgtgtcgatctcgctcggcaacacctgcctgtttcgcgtcggcggcctcgagcgcacggacaagaccatgtccttcaagctgtcgagcggcgatgtggttgttctcggcggtgagggacgcctgtgtttccacggtgtggatcgcatctaccccgcgacatcgacgcttctcaagaacggcggccgcatcaacctgacgcttcggcgcgtgaaaccctagagtttcctcaaagcgacctgttcgatcagatgatcctgccccttgcgcaggatcaggtccgcgcgcgggcgcgtcggcaggatgttttcgcgaaggttcttgaggttgatgttctgccagagcccctcggcgatcgacagcgcttcctcctcgctgatcgaggcatagcggtggaagaacgagttcggatcgcggaaggcggtctcgcgcaggcccatgaagcgcgtcacgtaccagtcgtgaatccggctttcatccgcgtcgatgtagatcgagaagtcgaagaagtccgagaccatcggcacgatcttgccacccgccggcaggtcgcgcgattgcagcacgttgatgccctcgaagatcaggatgtctggccggtcgatgatcttgtattcgttcggcagcacgtcatagacgaggtgcgagtaggacggcgccttgacgtcgggctgcccggccttgatcgccgccagaaaccgcaggatggcaccggtgtcgtagctctcggggaagcccttgcgctgcatcaggttttcccgctgcagcacggcgttcggatgcaggaagccgtccgtggtcaccagatccaccttcgggctcgacggccagcggcgcaagagctccttcaggatacgcgccgtcgtcgatttgcccaccgccaccgagccggcgatgccgatcacgaacggcgtcttcgccacgttcgacaggctgaggaagcggttgcgctgctggaacagcagctgcgacgattccacatgggccgaaagcaggcgcgagaccgagagatagatgcgcctcacttcgtcgagatcgatcgggtcgcccatcgagcgcagccgcttgacctcgtccgaggtcagcgtcatcggcgtgtccgccctgagcttcgcccattcctcggatgaaaagaagtgatagggcgaataggcattcgcctggaaatgatcgtgcgtctcgtgcgcaccggtgatctgtcttgcgatacccatcagctttgccgactggccttctccctgaggccggattgagcggtacgacgctcaagttccgccatgacatcttgtagcggaacgccggcgatcttcaatacgaccaagagatgatagagcacgtcggccgcctcgtaggcgagattttcgcgatcgtcggtcacggccgccatgacggcttcgatcgcctcctcgccaagcttcttcgccgccttcgcctgaccggcggcaacgagcttcgccgtccaggattcctcgggcgaagcctttgatcgcgtatcgacgatcttttcgaggtcgctgagtgtgaattcgctcatcatatcgctttcagtctcagtcgagacgcatgtcgatgccgcaggaagacatatagcgcttcgcttcgccgacggaataggtgccgaagtggaagatcgaggcggcgagaaccgctgtcgcatggccctccttgacgccggccacgaggtcatcgagatcgccgacgccgcccgatgcgatgacgggcacacgcaccgcatcggcaatcgcccgcgtcagctccagatcgtagccggctttcgttccgtcgcggtccatcgaggtcaccagcaattcgccggccccgcgctcgaccatgcggcgcgcgaaatcgacggcatcgatgcccgtcgcgttgcggccgccatgggtgtagatctcccaggcgctggcgtctccgctggcaggggtctgccggcgcttggcgtcgatcgacacgacgatgcactggtcgccgaacttgtcggccgcctccgccacgaaatcagggttgctgacggccgccgaattgatcgacaccttgtcggccccgcaaagcagcagcttgcggatgtctgcgatcgtccgcacgccaccaccgacggtcaccggcatgaagcactggtcggccgtgcgtgacaccacgtcgaagatcgtttcgcggttgtcggaggaggcggtgatgtcgaggaagcagagctcgtcggcgccggccgcgtcataggccttggcggcctcgacgggatcgccggcatcgacgaggttgaggaagttgacgcccttgacgacgcggccgtccttgacgtcgaggcagggaatgacgcgagccttcagggtcattgcgcggtctccttcgcgcgagacgctttgatcagcgccagcgcttggctgggatcgatacggccgtcatagagcgcgcggcctgaaatcgcgccttccagcttggcggcatccggcttcagcatccgcttgatgtcgtcgatcgaagccaggccgcccgatgcgatgaccgggatggataccgcatcggccagttccagcgtcgaatcccagttgatcccggtcaggatgccgtcgcggtcgatgtcggtatagatgatcgccgccacaccggcgccctcgaattttttagccagttcgatgatgccgagctcggacgcctccgcccagccctcgacggccaccttgccgcccttggcgtcgatgccgacggccacatgtccggggaatttacggcaggcctcgatcacaagcgccggatcgcgcacggcaacggtgccgaggatcacccgcgacagcccgcgcgacagccagctctcgatgtggtcgagtgtgcggataccgccgccgagctgcaccgggttcttggtggccttcaggatcgcatcgacggcagcgccattgacgctctcgccggcgaacgcgccgttgagatcgaccacgtgcagccattcgaagccctggtcctcgaaggccttggcctgcgcgccggggtcgggattgtagacggtggcctgctccatgtcgcccagcttgaggcgaacgcactggccgtccttgagatcgatggcgggaaagaggatcattctgtcagtcctttgaaggcgcgagctcagggcttccagcgcaggaaattggcaatcagggcgagaccgagcttctggctcttctccggatggaactgcgcgccggccatgttgtcgcgtccgacaaaggccgtcagcgggccaccgtagcccgtggtcgcgatcacgtcctcggggtttcgagcggccagatggtaggaatgcacgaaataggcatgcagcccgtcagggcctgtcggaatgccgtcgaacagcgggtgagggcgcttgaggtcgagcgtgttccagccgatctgcggtatcttcagattgggatcgtcgggcgtcatttcaacgacgtcgccgggaatccagccgaggccctcggtcgtggtcttctccagcccgcgcgaggacatcagctgcatgccgacgcagatgccgaggaaaggccgtgccttcttctcgaccacgtcgatcagcgcctcggtcatcccgggcacggcgtccagtccgcgccggcaatcggcataagcgccgacacccggcaaaacgacgcgatcggcggcggcaacgacatcggccttgtcggtgaggtcgatcgcagcctcgatgccggcctcgcgggcggcccgctcgaaggccttcgtcgccgagcgcagattgccggagccgtagtcgataattgcgacgcgcatcagcgtcctccatcaaagccaaagagaccgagcgaggtcgcggtgccgcgatcggcgcggttaccgccatcccattgcggtgacggcaagggagtgtcgtcaccgagatcggtctgaatttcagaaaagtagatttcctcggcgacgtcgagccgatcggccgagatcagcgcttcgtcctgccagcccttggagacaagcttgcgcacccaaaggttctgtccctcgaagccgacgagaaggctggtgccgaaggtcacggcgagaccgaccagccacaggcctggctgatccatcagcgcgccgccgatggtctgcagcagaaaggcggcgacggcgtagagccagagccggtgaacggcgagccagatccacggaaacatgaagccgagcacgctgaagccgtcgcggatgaagcgcgtcttctcgtgcgtggtgtcggcgccgccgggggcggtcagaaccagatagctggaagtcatgtcgtcaagctccctgaaggggcttagacgagcgtgcccttcgtcgagggtacacggcccgcctgcctaggatcgatctctgtcgccgtgcgcagcgcgcgggcgacggccttgaagcacgtctcggcaatatggtggttgttggcaccataatggttcaggacatgcaaggtgatcccggcgttctgggccagtgcctggaagaactcgcggacgagttcggtgtcgaacgtgccgatcttcggcgcgctgaacgacacgttccagacgaggaagggacggccggaaagatcgacggcggccttcgtcatcgtctcgtccatggcaaggtcgatcgaggcgtagcgggtgatgccgcgacggtcgccgagcgccttggcgatggcctggccgatggcgatgccggtgtcttccaccgcatggtggtcgtcgacatgcagatcgcccttggtttcgatctccatgtcgatcagcgaatgtcgcgacagttggtcgagcatatggtcgaagaagccgacgccggtcgaaatcgtcgattttccggtaccgtcgagattgacggaaacggaaaccgaggtctcgttggtcttgcgggataccgatcccgtacggcttgctgcggtctcggccatatggcgctccctccgaaatacgcgggttccttatcaggcgtgccgggaaatatccagaagcgcgggcagagaaatcgaagccaattgcaatcggcattcgccaacttacatagggctcaacggggccgatgtgcggcccgaggtaagcgcccgcctgacgggccagggtataatcgatgacaaccattatcacggtccgaaagggcggcaaggtcatcatggcgggcgatggacaggtcagcctcggccagaccgtcatgaagggcaatgcccgcaaggtgcgccgcatcggcaagggcgacgtcattgccggtttcgccggtgccaccgccgacgccttcacgctcttggagcggctcgagaagaagctcgagcagtatcccggccagctgatgcgcgccgccgtcgagctcgccaaggattggcgtaccgacaagtatctgcgcaatctcgaagccatgatgctggtcgccgacaagtcggtgacgctggcgatcaccggcaacggcgacgtgctcgagcccgaacatggcgccatcgccatcggctccggcggcaactacgccttcgccgccgcccgcgccctgatggacagcgacaagtcggccgaagaagtggcccgccgggcgctggatatcgccgccgatatctgcgtctacaccaaccacaatctcgtggtcgaaacgctcgacgccgaataacggcaatcgttcacaatgggtcctgtgggccgggccgagaacggccggccggagcaggaaagccaagaggatatcatgaccaatttttctccccgggaaatcgtctccgagctggaccgccacatcatcggccagcatgacgccaagcgcgccgtcgccattgcgctgcgcaaccgctggcgccgccagcagctcgatgagagcctgcgcgacgaagtgatgcccaagaacatcctgatgatcggcccgaccggcgtcggcaagacggaaatctcccgccgcctcgccaagctcgccggcgcccccttcatcaaggtcgaagccacgaagttcaccgaagtcggttatgtcggccgcgatgtcgagcagatcgtccgcgacctcgtcgaggtcggcatcggtctggcgcgcgaaaagaagcgcgccgaggtcgaggccaaggcccatatgagcgccgaggaacgcgtgctcgacgcgctggtcggatcgaccgcatcgccggccacccgcgacagcttccgcaagaagctgcgcgccggtgagctcgacgacaaggaaatcgatatcgaggtggcagataccagcaccggcatgggcggcttcgacatccccggcatgcccggcggcaacatcggcatgatcaacctgtcggaaatgttcggcaaggccatgggcggccgcaccaagaaggtgcgcaccacggtcaaggcctcctataccgacctgatccgcgacgaatccgacaagctgatcgacagtgaagtcatccagcgcgaggccgtccgctccgtcgaaaacgacggcatcgtcttcctcgacgagatcgacaagatcgccgctcgcgatggcggcatgggcgcgggcgtgtcccgcgaaggcgtgcagcgcgacctgctgccgctggtcgaaggcacgacggtgtcgaccaagtacgggccggtgaagaccgaccacgtgctcttcatcgcatccggcgcctttcacgtctccaagccgtcggacctgctgcccgaattgcagggccgcctgccgatccgtgtcgaattgcgtccgctgaccaaggaagactttcgccgcatcctgacggaaaccgaggccagcctcatccgccagtacaaggcgctgatggaaaccgaaggtctgacgctggaattcaccgatgacggcatcgatgcgcttgccgacgtcgccgttcacctgaacgcctcggtcgaaaacatcggcgcgcgtcgcctgcagacggtgatggagcgcgtgctggacgaaatctccttcaacgccccggatcgcggcggcacctcggtgacgatagacgccgaatacgtacgcaagaacgtcggcgatctcgcccagaacaccgacctgtcgcgcttcattctgtgatgcgcaaacaccggtcctggcttttgccggcatgacgcagtaactttgaccgtcgaaactctcgacaacgggccttttactttttagtgaaaggcccgtcttgttattggcgccagcattattcggccaagattttggtacagtcagcgcgccagccaagcgagcccggcaaattgggccagcgaaactgaaaatgccgaccaatgcctaaacgatgggaaagctgatcgtgcgacgccttctgacgagccttgtaattgccgccaccgtctttgccgccgcgcccgcattctccatgcaggtcgtgccaccgggcaatcgcaatgtcgagcagccggacgtccccggcgcatctgtccgccgcaccaagggcaccaagaccaccttcgaccgcaagtacgagaaggtccgcgagcttctcgccaccgatcgcgaactgatggcgaagatcaagaaggtgtcggccgcctatggcatcgacccgatccacgtggtcggcgccatcgtcggcgagcacacctataatgtcgacgcctacgaccgccttcagtcctactacgtcaaggccgcgtcctatgccggcgaaagcttccgtttcgcctatgacggcgagaacgtggatgatttcgtcaagcgtccgcaattttccgcatgcgatggcaagaccgattcctacacgctctggagctgccgcgaggatgtctgggaaagcgatttccgcggcaagaccgtcggcggcaagagcttcccgaacaatcgcttcagcgccgtcttcttccagcccttctatgccggccagaccttcggcctcggccagatcaatccgctcaccgcgctgatgctctccgatctcgtcaaccgtgtttccggctatgacaagctcaacgagaaggatgcaggcagcgtctacaaggcgatcatgcagcccgatatctcgctggccttcgtggccgccgccgtgcgccgctcgatcgacgattacaagcagatcgccggcatggatatctcgaagaacccgggcctgacggcaacgctctacaatctcggcaattcccgccagcgtgccgcggcgctggccgccaagaaccgcgcctccggcgaaacggcctggccggaagagaactattacggatggttgatcaacgacaagctggacgagctggagcccctgctctagcctttaggggagggtgacaatcttccccgaaaggctttcccatggacatgcgtccagatccgttcgttccgccagcgcccgttccgcgcaccgtgccgccgagccggcttgagatcatccgcaccatcctgcgcaatccgctggagctttggggcgagccctcctacacgctccccttcatcaagacgaagttcttccgcgaacgcacgatcatcgtcaacgatcctggcctgatcaagcatgtgctggtcgacaacgccgccaattaccgcatgtcggatatccgccagctgatcctgcgccccatcctgcgcgacggcttgctgacggccgagggcgaggtctggaagcgttcgcgcaaggccgtagcgccggtcttcacgccgcgccacgccaatggcttcgccggccagatgctgcggcagtcggaagactatatccgcaagtatgagatggcgggcagcacgggaaagaccttcgagatcgccagcgacatggccgaactcactttcgccatccttgccgacacgctgttttcgggcgagatcgtcacctcgtccgatagtttcgccgacgatgtcaacgcgctcctgcatcgcatgggccgcgtcgatccgatggatctgctgcgcgcgccctcctgggtgccgcgcgtcacgcgtatcggcggccagaaggtgctcgagaaattccgcaccatcgttcgcgaaaccatggatgcccgtctcctgcgcatggaagaggatcgcggcgcgacgcccgaggatttcctgacgctcttgctcgaccaggcgaaatcgggcgggctcaccaatgccgagatcgaggacaatatcctgacgttcatcggcgccggccatgaaaccacggcccgcgcgctcgcctggacgctctattgcgtcgccaacacgccgcatatccgcgatgcgatggaagaggagatcgaccgcgtgcttgccgacggcgccgaaccggtgaagtggctcgatctcatgccctatacccgcgccgccttcgaggaagccctgcgcctctatccgccggcgccctcgatcaaccgcgccgcgatatcggacgaccgctggacgaatgaaaagggcgagaccgtcgagatcgaggccggcgtcaccgtgctgatcatgccctggacgctgcatcgccacgaactctattgggacaagccccgcgcctacatgcccgagcgcttcctgcccgagaaccgcgccaagatcagccgcttccagtttcttccgttcggcgccggcccgcgcgtctgcatcggcgccaccttcgcgctgcaggaggcggtcatcgcgctcgctgtcatgatgcatcgcttccgcttcgacatgacggatgaaaccaatccgtggccggttcagaaactgaccacccagccgcagaacggccttcccatgcgcatcacgccgagagtccacgcctgaaaaggcataaatctttcaaactattgcctgattgactatgaatgaaagccggtgaaagtggcagcatgcgaaaaaagcgccgcccgaggagatagtctatgagccgcatcgaaaaacacggtcttgcgatcgaagccgtccttcatgatttcctggtcaaggaggcgctgcccggtctcgggctcgatgcggacaggttctttgccgacttctcggccatcgtccacgatctggcgccgaaaaaccgcgaactgctcgccaggcgcgacgcgctgcagcagcgcctcgacgattggtatcgccagcacggcgcccccaccgatatggacgcctatcaggcattcctgcgcgagatcggctatctcctgcccgaggggtcggattttcaggtcggcacgacgaatgtcgatccggagatcgcctccatcgccggcccgcagctggtcgttccggtcatgaacgcccgctacgcgctgaatgccgccaacgcccgctggggctcgctctacgacgcgctctacggcaccgacgcgatttccgaggccgatggcgcggagaagggcaagggctacaatcccaagcgcggcgaaaaggtcatcgcctgggttcgcaccttcctcgacaatgccgtcccgctcgtcgattggagctggaaggacgtcgccggtctgacgatcaaggacggcgcgctcgccatcacatcgaccgatggcgaacatgtcgctccgaaagacccttcacatttcgccggctaccggggcgatcccgcggcacccaccaacatcctcctgaagaacaacggcatccatatcgatatcgtcatcgatgcctccaccgatatcggcaagggagacgctgcccatatctccgatgtctggctcgaatccgccattaccacgatcatggactgcgaggattccatcgccgccgtcgacgccgaggacaagaccgaggtctatcgcaactggctcggcctgatgaaaggcgatctccgggaggaagtcgtgaagggtggcaagagcttcatccgcaagctcaatcccgatctcgactacacaggtcctgacggtgccagcttcgaggtccatcgccgctcgctgatgctgatccgcaatgtcggccacctcatgacgaatccggctatccttgatcgcgatggcaacgaggtgccggagggcatcatggacgccatgatcaccgccgccatcgcgctctacgacatcggcccgaacggccgccgcaagaattcgcgcaccggctcgatgtatgtcgtcaagccgaagatgcacggccccgaggaagtcgccttcgccgtcgagatcttcggccgcgtcgaggatgcgctcggcatggcgaaaaacaccatgaaaatgggcatcatggacgaggagcgccgcaccaccgtcaacctcaaggaatgcattcgcgccgcccgcgagcgcgtcgtcttcatcaacaccggcttcctcgatcgcaccggcgacgagatgcacacctcgatggaagccggcccgatgatccgtaagggcgacatgaagcaggccgcatggatctcggcctacgagaactggaacgtcgatgtcggtctcgaatgcggcctttccggtcatgcgcagatcggcaagggcatgtgggccatgccggatctgatggcggccatgctggagcagaagatcgcgcatccgaaagccggcgccaacaccgcctgggtgccgtcgcccacggccgccacgctgcacgccacgcattatcaccgcgtcaacgtcgccaacgtccagcgcggcctgaaggatcgcccgcgcgccaagctcggcgatatcctctccgtgcccgttgccgtccgtccgaactggacgccggaggaaatccagcgcgaactcgacaacaacgctcaagggatcctgggttacgtcgtgcgctgggtcgatcagggcgtcggctgctccaaggtccccgacatcaacaacatcggcctgatggaggatcgcgcgacgctgcgcatctctgcgcagcacatggccaactggctgttgcacaaggtggttacggaagcgcagatcgtcgagacgatgaaacgcatggccgccgtggtcgatggccagaacgccggcgatccggcctatcatccgatggctgccgatttcgatcgctcgatcgccttccacgccgccctcgaactggtgctgaagggcagggcgcagccgaacggctataccgagccggtcctgcaccgccgccgactggaattgaaggccgcgcaagcggcttgatcccagcttgaagatacgaaaaggccgccggaacattcgctccggcggccttctttataccgaatttcaggtccagcttactggataacgatgaccttcgaggtcgtcttgcccggacggacgcgactgtagaggtcgatgacgtcctggttgatgaggcggatgcagcccgacgaagcggcggtgccgatcgattgccattccggcgtgccgtgcaggcggaaaagcgtatccttgccctcgttattgaagaggtacatggcgcgcgcgcccagcggattggtcaggccggggcccatgccgccctcgacatatttggcgatctcggggcggcgaacggccatttccttcgggggatgccagttcggccattcctgcttccaggcgacgtatgcggtgccggcccatgcgaagccttccttgccgacgccgatgccgtagcgcatcgccttgccgcccggcaggatgtagtaaaggaagcgttcgcgggtgttgacgatgatggtgcccggacgttccgtgctttcgtaggagacgatctggcggcggaactgcggcttgacctgctggatcgggatcgcgggcagcgagtatccggcatccgtggtgacgccgtagacgtcgtcgaagatctgcgcggtctggacggtcggacccgacgcggctgccttgttttcgacggaggcgctgtcggaagtcgtggagcaaccggccagagcgagcgtcgccatcaggccgaatacaggaagtgcattgcggatgcgcatggatgtctcttaagaatggggcaaaggggggatcgttctttcgaaccatcttagattatggtttattttcgattaacttcgccttggcaagctgttgcagtgcggcggagcaattacgcaacggcaaactagaaccgcatggtttttttgcaacaacgccggcgccggccccgagcttatccatgacgattttgagtgtttacaataacaatccgttaatcgatggccgacagtcggacagagccatgctcgtgcgtcgcggaactcaaattctacttcacgagatgcgccatgccgtcctgccggaacttccgctcgccagcggccggcgcgccgatctcatcaccatctcggaaaagggcgagatctggatcatcgagatcaagacctcgatcgaggatttcagggtggaccgcaagtggccggaataccgcctgcattgcgaccggctgttcttcgcgacacacaaggatgtgccgctcgatatcttccccgaggactgcggactgtttctgtcggatggttacggcgcccacatgatccgcgaggcgcccgagcatcggctggcgcccgccacgcgcaaatccgtcacgctgaatttctcccgtgcggccgcacagcgcctgctgctggccgagtgggccaccggcaagccgcttggcgtcgacgacgtctgacccaggctttttcgtggtctcttactttggcgcccgcttggcgaggatgcgctgcaacgtacggcggtgcatgttgagccggcgcgccgtctccgacacgttgcgttcgcagatttcgtagacgcgctgaatatgttcccagcgaacccggtcggccgacatcgggttctccggcagttcggctttctcgccgctgcgctgcgtcagcgccgcatagacatcgtcggcgtcggcgggcttggccagatagtcgacggcgccgagcttcaccgcggtcaccgccgttgcgatattgccgtagccggtcaggacgacgatgcgggtatcgtcgcgcttctggcggatcgcctcgatcacatcaagcccgttgccgtcgccgagcctgagatcgaccaccgcgtatttcggcgggctgctgttcgacttggcgacgccttccgctaccgattcggccgtttccacctcaaagccgcgcgtctccatggcgcgcgccagccgtcgcaggaacggtccgtcgtcatcgacgatcagcaggctggcgtccgggccgatgtcgtcggcgctggcgggggaggggtcggtaatctgctcactcattgactcaatcctggcgctgtcagcctgatataggccgattgcattgcattttctttagccccctcggctcattttgtcgaatgcgtatccatcagcacccgcggccattcgacgcgaacgcgcgcgccgacataatcaggcccgcgattctcgaaggtcaggactgcccccgagcgctccagcagcgtcttggcgatgaacagcccgagccccagtcctccggcacgatcttccctctgccgcttggtcacgtaaggctcgccgatcctgagcaggatgtcgggcgagtaaccttcgccgtcgtcctccacggtgatgcgcacgcgctcctggtcgtgctccaccgtcaccgtgacctcccggcgggcatagtcgacggcgttctcgatcaggttgccgagcccgtacatcatgccggcgttgcgctcggtcaccggctcgcccttgcgcggcgccttttccaccaggttgagcttgatgccgaattcgcgatgcggcgcgacgatctcctccatcatcgaggagagcggcaggcgtctgagatgcgcgtcgccctcggccgagagtgtcgtcagccggcgcaggatgtcgcggcagcgctcgctctggctgcgcagcagctgcacgtcctcgcgaaaacgatcgtcgtccttcagctcccgctccatctccttggcgacgacgctgatcgtcgcgagcggcgtgcccagctcgtgcgccgccgccgccgccaggccatcgagctgcgacagatgtttctcgcgctgcagcaccagctccgtcgccgccagcgcctcggcgagctggcgcgcttccatcgacacgcgataggcatagaaggcggcaaacgtcatggtcgaagcgatcgcgcaccacaccccgaattgcatcacgcttggcacattgatctcggctccctcgaaccagggaagcgggaagggcgagaaggacaggatcgtgatgcagatcatcgccaccacgatcagcgacatgctgtagcggatcggctgcgacgcgaaggcgatgatgacgggaacgcacaccagaaccgcgaagggattgacgagcccgccggtgatgaagagcagcgcgcagagctgcaatagatcgaagccgagcagcgccagcgccgccaccgggtcgatgcggtgcgtcgccggatagcggatcatcagatagaagttcaccagcgccagcgccgcgatcagcgccatgctctcggccagcggcaacgggaatttgagccagactgcgacgatcaacacggtcgcggtctgcccgcaaacggcaagccaccgcaaccgaaccagcgtttccagcctcagccgccggctgctttgtctgtcttcctcgggcacgctttcgactttgctggccatctctttatccttgaacggcatgtcgcctcatgttcctcgcggtttcgcccgggtggtcggcggtgcttcttccggcttttccggccagggatgccggggatagcgcccgcgcatgtcggcgcgcacgtccctccagctcccggcccagaaccccggaagatcccgcgtcgtctggatcggccgatgcgccggcgacgtcagctcgagcagcagcgaaagccggccgccggcgatcgcgggatgtgtcttcagcccgaacagctcctgaacccggatcgtcagcgtcggctcttcgccgtcatattgtatcggatgcctttgtcccgtcggcgcttcgaaatgcgtcggcgccagccgtgcgaggtcgcgttgcagctcgtgcggcaccagcgccagcaatccgttcgaaagcccgcccgccgaaatgtcggaaagcccccgcgcatccgtctggtagggaatgaaccagtcctccatgcgagacatgagcgccgcgtcgctcatgtcgggccatggcgcgccgatacttctatgaagaaagccgattcgctcgcgcagctgcgtcgcttccttcgaaaacggcagctgttccagcccgatctccctgatcccctcggcaagcgcccgcgtgacggcctcgccggaggggcgaggcagcggcgtctcgtcaaaaacgatggcgccgagccgcgtcgcccgtcttgcgcgcacctgtctgctctgccggtcgaagaaggtctggtcgtcggtgcggatcgcgccgggcagctccgcctcgacatccccgcgcgtcacttcggccgccgcgagaatccgcgcctgcgccgcccggcccgtgaggtcggcgatcacaagcatcgggctgctcgccagccgctcggtctcggcaatctccgcgccgcgcccattggccatcacgaagcgcccgcgcccgccgcgctgcagcgcgatgcgatctggaaaggcatggataaggagccggccggcgaggcccggctcgtcggccacgatctggtcgcgcccttttgccagccggagagcgagctgtcgcgccgcctcggcgcgttcgccacgctcggatttgaagcggcgcagccggtcttcgagatcgatgctcgttccgcccaatccctgttccgtcagaagcacggccatcatcgccgcctcccttgcatggcccgtttctcccgacgagagcaccatcgccgcgagccgcggcggaagcgccatgtcgcgcatctcccggccgcgcgccgtcagcccgccatcgcggtcgagcgcgccgagttgaagcagcagcgcgcgcgcctccagaagcgtcgtttccggcggctggtccatgaagccgagcgcccgcgtgtcctgcacgccccaataggcgaggtcgagtacgaggccggagaggtcggtcgagaggatctgcggcggcgtgaaggcgggcatcgccgccgtctgcccctggtgccacagccggatggcgatccccggctcggttcgcccggcgcgtccggcccgctggtcggccgaggcccgcgatacccgcaccgtttccagccgggtaatcccggtcgacgcctcgaacaccggcaggcgctgcaacccgctgtcgatcacgatccggacgccgtcgatggtgatcgacgtctcggcgatcgaggtcgccagcacgatcttgcgggtaccgggcgcagccggccggatcgccgcatcctgttccttctggctgagattgccgtagagcggcgcgatcacggtggtcgcgtcgaatcgctcccgcagccgctcggccgtcctgacgatttcggcctgcccgggcaggaaggcgaggatcgatccgctctccgttcggtgcgcgtcgatgatcgcgcgtgtcatcgtctcctcgatccgctcgccgcccggccggtcctgatggcgaatatcgatcgggaagccgcgtcccatgctttcgatcaagggcgggttgtcgagcaacgccaccacgccggcaacgtcgagcgtcgccgacatcaccagtatcctcagatcctcgcgcagcgccgattgcacgtcgagcgccagcgccagcccgaaatcggcgtcgagcgaccgctcgtgaaactcgtcgaagatcaccgccgatacgcccgagagctcgggatcgtcgagaatcatccgcgcgaacacgccctcggtcaccacctcgatccgcgttcgcgtcgaaatcctggtatcgagccgcatgcgatagccgacggtctcgccgacattctgattaagcagcgccgccatacgcccggcggccgcgcgcgccgcaagccgccgtggttcgagcaggatgatcctgccgtcgccgcgccatgcctcgttgaggagatgaagcggcaccagcgtcgtcttgccagcccccggcggcgccgacagcaccgcgcgtcgcgcggtcgcgagcgccgcgccgatcgccggcagaacatgggagaccgggagctccggcagggcacgcaggtcgatcacgcctcgtcagtcctctctaatctatatatggctgggcggaatggccccttatctctctataaggcgcactctatagagggcgacggcggttcggcaaaccagtgatggcgccgattatgcgcgttcgatgcggcgtgaaggacgaatattgccggttttgggttgctccggcgtgatcagcctcgaaaaacaccggcggctgtcacaaagccaatctggccgcttgctgccgcccatgaaattccctc

SEQ ID NO: 33 - DNA, 51677 bp, Rhizobium matallidurans
  source 1..51677: mol_type = genomic DNA
cttcttcacgttgctcagccattcgtcgatcttgtcgaggaaaaccccgtcctggcattcgccgccgctgcagaagcgcgcgtcggtcgatttggccagatcgacaaaggtaacccggtcggccacgcccttgctgccggtattgttgtcgaaccatgcaacgtcgacgcccgcgcgagacaggacgtccagcaggccctcgttcgccagtcccttgtagtgatcgtaattgctgcgcgtgaactgcgaaaacatgcagggaatcgacgttgccgttgccgtgccgcaactcgtcgtgttcgggaagtagacgatatcctgtttcttcaactcgggattggtctcgcgctcgtagccgccgagcgagaaattctgcgcgcgcgccgtttcgccggcgacgatgatcgtgaccctcggcttggtcgttggtcccgcgggtgtcgagacctttgcgtccagcccgagcggcgtcaccacgatcgccgcctcctgtccggcctgaacgaaatacttggccgtgctgacgatcgcaacgacggggttgagtgtcttcaccaggtcgcgatgcgtgcggatggcggtcgtgtaggccttggaatagacgagggctgcgacggaaaagaccgcaagacaggcgatgacggtcacgctgttccagagcagcttctgcatgattggtcgatgcacgacacgcacccacaggacgagggccaccggaacaactccgaacagcaaggcgtggagaagcaggccaggcgtaatcagatgctgggcttcggagggcgtcgtctgcatcgcgttgcggatcatgtccgtatcgatgacgacgccgaaggagtccgtgaaccaggcggccatcgcggctgcgatgatcaggaagatcagcaccggcttgatcacgtatttggccgagaacagcgtggtcgcggcgatgaacagcgtgatgatcgcgatgtacagtgcgatgaccgcgcccggttcgaagccgagataggcgtgaaccttcttccagaaggtgaaattggtgaacagagcgagatagagaccgacgatcgcggaaagggtgacgctgccgattgttggacgggtcagcaggaatttacggacgtgttttttttctgtcatgccgatactctatggtctttctgcacaccgaatgggcgagagccgaccgcgcttcatcaccgcaaaggtcgtaagtgcggcagaaccctgacaccaacctgaacgactttccgggcaagctcccgcggaagacgctgttacgcgctcgggcgtcacggcagaggtagggctggaagcgatagtcgccggcagcaagatcggtctgcgctggcgctgtcatcccggatcgaatgcgagcctccgccggacagtaaggtctacgcaagcaaccgggcacaaaagtatcctcgaatatctgcacatcagtgaagcggcggcgcagcacgccaccgccgtcgctgctgtcggtcaatggagttgatgctttgaacaatgctgccgccaggatcctcgaggctgaagaagaagggcatgtgatcgccggcaaggcggtgatcgtgcgcgccgtctatgaaggcaaggacgtcacaccctattgggagatgttgatggcacgggtgtcggcgaacctcgccgacgcgggcgccttcatggatctctcgatcattctccaggtgctcggcaggtccgatgaggccgccatcgcccaaaatggggcgctggagacaagccgcgactaccggattcgcaacggcatgggcacggggattcgcgtgctggtgatcgtcacgcgcggcgacttcatggccaacacgccgatcgaattcctgctggagagctccgacaccagtatcctgcttcactatgtcgacgagacgaccgcagctctcgacaacgtccccgaacacgacgtcgccttcgtggcggtcggcgaatcgcccgacaatcgcccggtgctcgaaaatctcgaacgcatgctggagacctggaagggtccgatcctcaacaatgcgccacgcgcgatcatcgatctgtcgcgtgagggtgtctcggaagcgtttcgggacgagcccagcattttagccccgctcacaagtcggatcgcgcgcgcggagttgcgtgatctcgcgaatggaacgcgtgggctcgacacggtcgacggcctctccacctttccggtcattgtccgcccgacaggcacgcatgccggtcacggcatggaaaagatcgcaagcgaagacgagctggctggctatctggaagggcgcgacgagaccgatttctatatcgcccccttcatcgattacagcagcgaggatggcaagtttcgcaagcagcgcatcgcggtgatcgatggcaagccctatgcgagccatctcgcgatctcggatcactggatggtgcattatctcagcgccggcatggccgagcacggcgagcggcgtctggaagaggcgtcgtggatggagaatttcgacgaggatttcgcgatgcgtcacgcgaaagccttcgatgcgctgagccgccgcttcggtctcgactatttcgcggtcgactgcgcggagctctccgacgggcgtctgctgctctttgaagccgacgtcgccatgatcgtgcactcgatggattccgaaacggtctttccctacaagaaaaagccgatggcggcactgttcgcggcgtttgaaaacgcccttgcgaagcgcgtggtgcgagacgccaaggccggtcccctgttggtcgtcaagacgctctgatcacaaaaccccagcattcccagcatatggagacgacatgatcgccgccaccaagatgaccgatgacgcgtcggacgaccatgggcttctcggcgatcggacgagtgctggtcatgccctgtcgctgctgctttcggcgggcggcgacgggcgcatccagctcgacccggaaacgggccgcaatcgctacgggacgcgaacgatcccctccggaagcgagatctcgtttgcttccacgaccgccagcaacgtgtcatcacagggttttgcggctgccgacggtcaactgaagcgtctgttcggtgtcgatggatcgcatgccgtcgcgatggaccaatggttcgctgacatccgcgatcgtatcggtcgccatctcggctgccccggcagcggcgtcgttcttgcggcatccggcaccgacgtggagcttctcgctctcggcctgacgctggcgctgtcgaagcggccggtgacgaacatcctgatcgcgccggaggaaaccggcagcggtatcccgagggccgcggcaggaaggcatttcgccgaggcgacggcgctcggatatcgtgctgccgcgggcgagatgctcgacggcatatctgccgaccgcgtcgaggtgcggacagtggcgatccgcaacgacgcgggacaggcgcgcagcgccgacgacatcgatcgcgacgtcattgcgctggcggaagatgcgttgaaacgcgaccgcgacgtcctcctgcatgttctcgatacgtcgaaaactggtctgacggcggtcacgcgcgccgccgcgcgccacgtcgcggggctggcgccgggccgcgtccgtgttctggtcgatgcctgccagttccgctgcggtagcgccgaccttcgccgcgatatcgccgacggtttcctcgtcgccgtgaccggctcgaaattcctggccggcccacccttcgccggtgctcttgctcttccgcccgcgctggccgacgaattggccgtgacggcgccgctcgcggccggcctttcgcactacacggctcttcacgactggtcggcgctgatgcgcggccggaccgaactggagttcggctcgcacttcaatctcggcctcggcttgcggtggatcgccgcgctcgaacagctcgatccgctgacagcagtcggagccgacctgcagcgcaagatcaggcaagcattcgccgacctcgtgcgcctgcgcgccgctcgtctcgacggtgctctgatccacgccgacgacgagggcgaccacattgtcgaccgcgcgatcgtcccgctgacgatcaccaccggctccgacgctttcgcatcgctcgcgtacacgcagcgcctgcatcggtcgctccgcgaggatgtcgccggaccggtctgccacgtcgggcaggcggtcaatctggggagccgcacgatcctgcggatcgccgcctcggctaccgacatcaacgccgtatcggcgagattggtcgagggcgccagcatggatcgggcaatgcaaccgatcgccgacgatctcgataggctgttcgacaagtgggccatcctgtcccgatccgttcgagggatgtgatgtctcgtatgcagcaaccagatgtgtcgacaggcccggatgctctcgagcgcaagacgagcctcgatcccaccgactggcaggcgtttcgccaggccgcgcaccgcatgctcgacgatacgatcgaccatatcgccaatgtcgggcaaaagccggtctggcagccgatgccgccggaaacgcgagcgaaattcacgcgctcgctgccgctggatccgcgcgcgctcgatgacgtccttggcgacgtgcgtgagcacatctttccttacgcaacgggcaatctgcatccgcttttcatgggatgggtccacggcgccggcacgccggtcgggatggtggccgagatggtcgccgccggactgaacatgaactgcggcggccgcgatcatgtcggcatcgaggtcgagaagcagatcacgcgctggatggctgaagcgctcggctatccgcgatcggcaagcggcctgttcgtcaccggctcgtccatggccaacttcctggcgctgatcgttgccagaaccgaagcgctgggcgagggcgttcggcgggatggtgtgggtgcaaccggcgagcaactcgtcgcctatacatcgtcgcaggcgcatgtctgcatcgcccaggcgatggagctatcgggcatcggttccgcgaacctgcgctccgtcgccgtcgacgaagccggccgcatgagcatgcaggcgctgagggccgccatcgcaaaagaccgcgcgcagggttttcgccccttcctcgtggtggggacggcgggaaccgtcaatgccggcgccatcgatcctctggaggagatcgccgggatcgccgaagcggagaaaatctggtttcacgtcgatggcgcgataggcgccttgggcgtgctggcgcccgcattgaaaaacctgttcgcaggcatcgagcgctcggcttccgtggcgcttgatttccacaagtggggccacgttccatatgatgccggcttcctgctggtgcgcgacagcgacgctcacaagcgagccttcgcgcagccggccgcctatctgcagcgctcgggcagggggcttgcggccggcgatacctggccctgcgacctcggacccgacctgtcccgtggcttccgggcgctgaagacctggatgacgatcgagacgctcggcgcggagcgcatgggcgacgcgatggcccatacgtgcgagctcgctcgctatcttgccgcacgccttgaccgtgacccgcgtttcgagatcagggcgccggttgcgctcaatatcgtctgcttcggcattggcggagccaatgacgatttcatccgggaactcgtgctcgatctgcacgaatcaggcctcgcggctccatcgtggaccacggtggacggcgaacttgcagtgcgctgcgcgatcgtcaaccaccggacgacgaaggctgatatcgacagcttcgtcacaattctctcgcagcgtctcggttagccttttcatcggcccggccttgcattgtggcgttattgacacaggtcgccaatcaatcctccgcccgccgaaatgaaatagggctgttacaaacggcggcgaatatcgccgggttgataacctggggaccattcatgcgtcgcgcattccgcctgtccacatacgcattcgtcgcagccgcctgtctctacgccccggcgcaagccgaggatctgcagttttccgtatacggcggctaccagacagcgccgcacagcggcgtcgacgtgtccgatggaaccagcttcaacgccggctgggaaggcaagtccttcagcacgccgccctactatggcgcacgcgccatctggtggctcgagaacttcaactatcccaacctcggcctgtcgatcgattacacccacgccaaggtctacgccgacgagaagacgctcgccacgtcgggctggtccaagttcgaattcaccgacggtttgaaccttgtgaccgcgaacgcgctctatcgcttcccgcaggagggcaagcgctggacgccctatgtcggcgccggtgtcggcctcaacatcccgcatgtcgaagtgacgcgcccatccggcacgacgttcggctacgaagtcggcggcgtcacgttccaggcccaggccggcgtcgacttccgcatcaccgaccgctggtcgaccttccttgagtacaagggaaactattcgcttgtgaacgtgccgatcgacagcggcgacaagctcaagacaaacatcatcaccaatgccgttaacctcggtgtttcattccgtttctgacggccggattccggcgggttgagacggcttggatgtgtcggatcgcttcgttaatttagcgattcattaaccatattgattagaattgtctctatctgggcgaaagctttcgcaaattcgccgtgaaagccgcatgattaaagtctcgttaggttgatgacggtacggctagtttgcctgaaaaggcggactttgagccataacggtcttgagcggcgtggaacatatgagacgagacttccgggcggcggcatttgcgacacctatgcggtgggtgggcttgtcgcttatcagtgtgatggtgaccgcatgcggaacggcgcccacgacgacggccaagcgcacgcacggcaaggaatatttttccgagaaggaatacggcgtcaaggcgagcccgcgcgttgccaatggcaacaacatccccaagggcggcgggcgttaccttgtcggcaatccctacgtcgtcaagggcaagacctattacccgaaggaagacttctcctataacaaggtcggcatcgcctcctggtacggctcggccttccatgggcgcctgacagccaacggcgaagtctacgaccagatgtccatttccgccgcccatccgactttcccgttgccgagctatgcacgcgtcaccaatgtcgaaaatggctcgtcgatcatagtgcgcgtcaacgatcgcggcccgtatcacgaaggccgcattatcgatctctcgaacaagaccgccgatatgctcgatctccggcgtagcggcaccggcaatgtgcgcgtgcagtatgtcggcaaggcccgcatggatggctacgacatgccgtatctgatggcctcctacgtgccgaagggcagccgtatcccgggcgtgtcgccgggcgaggggcagatcgccagcggcgtcatggtggcgtccaacagcaagcgcatcacgcgcgacgaaatccagagtttcggcggcttcactccgccggcggaagacagcgttcccgttccgcagtccgccacctcctacgccggatcgaccccgagcgagccctatgccgccgcggttcccacacctttgcgcacgccgtctttcgacaatgccgcttccccatcgttcgatgaggtcgttgttctgcctgaagtcggtccctatccctacgagcggccttatggctggcagcagggatcgatggccatgggctaccaggaagagggcgcgaagactgtcgcggtcggtctcgccttcgatgcggtaatggtccgcaatgacggcttgaccgaagaaagcatcctggcatcattcaagcgtcagcaggcatcgaagtctgcgttgaagtaaatgtttcccaggtctctcgggatcggatcgatgagggtttcgatgctgaaacatgtgcttcgtctttgtgtgtgcctgttgccgctggcgcaggccgtttcgaccgatgccgtcgcggcgggcgatgccaatcagggcttcgccaccaaggccgcgcaggcctatatggtcgaggcgtcgaccggtacggtcctgcttgccaagaacgaaaatcagacattctcgccggcctcgctcgccaagctgatgaccgccgagctcgtcttcgacgcgctggcgagcaaccagctgacgcttgataccctgtatcccgtatccgaatacgcctggcgcaccggcggcgcgccgtcgcgcaccgccaccatgttcgccgcgctgaaatccaacgtccgcgtcgaggacctcctgcgcgggatcgccattcagggtgccaacgacagctgcatcattctcgccgaaggcatgagcggcggcgaggcggctttcgccgaaagcatgacacggcgcgcgaagacgcttgggatgcagcattcgctgttcgccaattccaccgggcttcccgacggcaagagcaagacgacggccttcgacatggtggcgctggcggagcggctgcaacagggctacccggcctattatccctacttcgcccagccggatttccagtggaacaagatcttccaacgaaaccgcaacccgctgcttggcttcgggatcggcgtcgacggtctggcgaccggctttgccgcaggcgagggctactcgatcgtcgcgtcggccgagcgcaacggtcgccgcctgttcatggcgctcggtggtatcgcatccgacaaggagcgcaccgaggaagccaggcgcgtgctcgaatggggcctcagcgcctttgaaatccgccagcttttcgccgacaacgaggtcatcggcaccgccagcgtctatggcggcgcatcgcgcagcgtcgaactcgtcgcgaaaagcccgatcagcgtctacatcccggtcaccaatcccgaccggctggcggcccgcatcgtctaccgctggccgttgccggccccggtcgaagcggaccgcgaagtcggcacgctgcggcttttcgcgggcagcagactgctgcgcgaagtgccgctctacaccaagacgtcgatcgaggagggctcgctcagcagccgcgccgtcgacgccgtgctggaactgggcgaaacgctgctgttttcctggctctgggataagccggccgagcccacatgatcgccatagtcgcgtttcaccctgtgacaaagctcggagatcgacgcgaatcggttccgctcgccgtcatcttcggttagacgtactggcgtggcgcagcggcgccgattgagtgcaggccaagatcgcaggaagatattgttgtcatccgctaccggattgttcgttacgtttgaaggcggtgagggggctggaaagtccacccagatccgcaggctggccgatgccttgcgcgccaggggccatgatgtcgtggtcacgcgcgagccgggcggttcgccgggcgccgaggccgtgcggcatgtgcttttgtcgggtgctgccgaatcctttggaacccgcatggaggcagtccttttcgcggccgcccgcaacgatcacgtcgaagagattatccgtccggcacttgccgagggcaaggtcgtgctctgtgaccgcttcatggattcctcgcgtgtctatcagggcgtcacgggcaatctcgagcccgacttcatcgaaacgctgcaacgcgtggcgatcaacggcgtcgttcccgactgcacgctgatgctcgacctgccggccaaggcaggcctcgagcgcgccaggcgccgcggtgctgccggcgatgtggcgcccgatcgattcgagaaggaagagatccaaacacacgagaagcgccgcgaagccttcctcgacatagcctcgcgcgagcccgagcgctgccacgtcgtcaacgcaatgcagaccgaggaggcgatcgcggcggagatcgtctcgatcgtcagccagttgctggcgccgacggatgcgccgaaggtcgccgagccggcgatgagtgatatcgatgagtgaggagcacccgagccttctcgacggcgccatctggccgccggaaaacaccaggctgttcggtcacgaagacgcggaagccttcctggcgcagtcctaccgatcgggcaaggggcaccatgcgctgctgatggaagggccgtcggggatcggcaaggcgacgctcgccttccgcttcgccaatcatgtcctgtcgcatccggatccggagagcgcgccggagtttctggccgatccggacccgaattcgtccgtcagccgccagatcaattccggcgcctcgcacaacctgctgcatctcgctcgtccggtcgacgagaagaccggcaaggtaaaatcggcgatcaccgtcgacgaggtgcgccgggccggacgcttcttctcgcagacctcgggcacgggcaactggcgcatcgtcatcatcgatcccgccgacgacatgaaccgaagtgccgccaacgccatcctgaagatcctcgaggagccgccgaagcgcgcgttgttcctgctgatctcgcatgcgccgggcaagctcctgccgaccatccgctcccgctgcctgccgctcaagttgtcgccgctcggtgacgacgcgctgcgctccgctctcggccatctcggcgtggacgcgaacgagccgtcgctgctggcctcggccaatggcagcgtcggcgaagcgctgaagctggtgaactacggcggcggcgaaatcattgccgcctataacgaggcgctgaccctgcaggggccatcggcgcgaaaggccatgcaccgtctcgccgacgcattatcgggcaaggaaagcgacacgatcttcgagttcttcgcaagccatctcggcgacgacctgatgggcagggcgaaggctgcggcgatggcggggcaggtggcccaggccgaacgtctgtcgcgcctgcacagcgatatcgtcgagcgcctgacggtctccgatgcctacaatctcgaccgcaagcagaccattctcggcattctcggcgatatcaagcagcccggaccttgatcggaaggccgtgatcacccggatcgtgatcaggtggccaggagcttgtaggcgacgatcgagagcgtcgccgccagcaccaggcggatggttcgctcgtgcagcttcggcgccagcaggctgccggcgatgatgccggggatcgagccgatgagcagcgccgcaagcatggtccagtcgatctcgccgatcatccagtagcccatgccgccgatcagcgtcagcggaacagcatggacgatgtcggagccgacgatctcgcgcacgtcgaggcgcggataaagcacgagcaggatggttacccccagcgcgccggcacccaccgacgtcaacgtcaccaggataccgagagccagcccgagcacgacggtcagaatggcgagcgttgccggccgcagcggccgccgctcgcccatcgagcgctgcgcaagcgccatcacttgcttgcgaaacaccagcatgaaggccgtcatgacgagcagccagccaagcgccgtcgtgatcgtatgcgcgacttcgatgctcttgcggtcgacgcctgaaagaagccacagcatgacaagggcggccggcacgctgccggcggcaagacagccgacgatccgccagttgatgcgtccatgcatgccgtggacggcggtgccggcgctcttggtgacggccgcgtaaagcaggtccgttccgacggcggtcgccggatggacgccgaacaacaagacgagcaggggcgtcatcagcgagccgccgccgacaccggtgatgccgaccagcgctcccacgaaaaaaccggagagcgaataaagcggatcgaagttggagagcatcagatcgccggccccaagcctacgcggagcaagcctgcgctgaaaacggcggtgcggcgggcgtctgttgtcacgtttgctgaaccctgttcgatggttcccttgggtagaatgcggaaaaaaacgagtcaagcacgcggccgtcacgaagattgcttcggcacgcgttggaggcgtaccattccaaacttactgtttcgcttcgccgccacatgcgctaaggagcggcgtatagatttcaaagaataagccgcacgagaatggccgccatgacagacaagacacccttctacatcaccaccgcgatttcctacccgaacggcaagccgcatatcggccacgcctacgagctgatcgcgacggatgccatggcgcgctaccagcgcctcgatggcaaggacgtgttcttcctgaccggcaccgacgagcacggccagaagatgcagcagacggcgcgcgccgaaggcatcaccgcgcaggaactcgccgaccgcaattccggcgaattccaggcgatggccaagctcctcaacgcctcgaacgacgacttcatccgcaccacgcaggagcgtcaccacgagacgtcgaagaacatctggaaccggatggccgacgccggcgacatctacaaggacagctatgccggctggtactcggtgcgcgatgaggcctactaccaggaaaacgagaccgagctgcgcgccgacggcgtgcgctacggaccgcagggcacgcccgtcgagtgggtggaggaggcaagctacttcttcaagctctccgaataccaggacaagctgctggcgctctacgaagccgagccggatttcatcggtccggccgagcgacgcaacgaggtgatctcgttcgtcaagtcggggctgaaggatctgtcgatctcgcgcaccaccttcgactggggcatcaaggtgccgaacgatccggaacacgtcatgtacgtctgggtcgacgcgctgaccaactatctgaccgccacgggttacctcgaggacaagaacggcccgcgcgccaagtattggccggccgacgtacacatcatcggcaaggacatcatccgtttccacgccgtctactggcctgccttcctgatgtcggccaagctgccgctgccaaagcgcgtcttcgcgcatggcttcgtgctggccaagggcggcgagaagatgtcgaagtcgctcggcaacgtgctcgatccgttcgaactgatcgagcatttcgggctcgacgcgatccgctacttcctgatgcgcgaaatctccttcggccatgacggcaattgcagcgaagaggcgatcggcacccgcatcaacgccgacctggccaacggcatcggcaacctcgccagccgctcgctgtcgatgatcgtcaagaactgcgacggcaagatccccgtctgcggtccgttgaccgacgaggacaaggcgatgctggccgcagccgacgcgctgctcgcctcgacgcgcgaggacatggaaaagcagctcatccatcgcgcgctgacgtcgatcatatccgtcgtgtccgagaccgaccgctatttcgccggccagcagccctgggcgttgaagaagaccgatcctgctcgtatggagaccgtgctttacgtcacggccgaagtcgtgcgccagatcgccatcctgctgcagcccttcgttccgggctccgccgaaaagatgctcgacctcgtgggagcctccgccgacaagcgcgacttcacggcgctcggtgaagccggacgcctggtgtcgggcacgccgctcgaagcgccgacgccggtcttcccgcgctacgtcgcgccgcaggcgtgaggccaggatgctgatcgatacccattgccatctggatttcgccgacttcgaggaggagcgcgacgagatcgtcaagcgtgcgcacgacagtggcgtcaagcagatggtgacgatctccacccgcgtccgcaagctggaaaatctgctcgcgatcaccgggaagtatccgtccgtctactgctccgtcggcacgcatcccaacaatgccgacgaagagctggacattcaggccgaagacctgatccgtctggccaatgcgcatgagaaggtggtcgcgatcggcgaggcgggtctcgactacttctacgacacgcaaaagcccgaggaccagaagaccggtttcctgcgccacatcgaggcagcccgagaaaccaggctgccgctggtcattcacagccgcagcgccgacgaggacatggccgcgatcctgaccgaggagacggggaagggcgccttccccttcatcctccactgcttctcggccggtgccgatctggcgcgcacgggcgtggagctcggcggctacgtgtccttctccggcatcctgaccttcccgaagtcgcaggagctgcgcgacatcgccgccaccatcccgcacgaccgcctgctggtcgaaacggacgcgccttatctcgcgccgaagcggtggcgcggcaagcgcaacgagccgtcctacgtggtcaacacggccgaggtgctcgccgagacgcttggcctcagctacgccgagatggcgacgatcacgacggacaacgccttccgctgcttctccaagatgccgaggatctgacacggtgggctacaggcggcggttcaccattctcggctgctcgtcctctccaggcgttccgcgcatcaccggcgactggggcgcctgcaatcccgacaatccgaagaaccggcgcacccgcgcctccttcatgatccagcaatatgacgacaacggcggcgtcaccaccgtggtcatcgataccgggccggattttcgcgagcagatgatatcagccagggtcgggcatgtggacgccgtcgcctacacccatccacacgccgatcatatccacgggctcgacgatctgcgcggctactatttcggcgcccagcagcgcgtaccgatctacgccgacgaagcgaccatggaccgcattcgccagggcttcggctattgcctggaaacgcctcccggcagcaattatccgccgatcgtcgaagcaaggctgatccgcgatctcgacacgcctgttcgtatcaccggcgccggcggcgccatttcattgcacccgcacctgcaacagcacggcgacatcacctcgctcggcttccggatcggggatgtggcctattgcagcgatatcagcgactttccgcccgaaagcgtacagaagttgcagggcctcgacgtgctgatcatcgatgcgctgcaataccgctaccacccgagccatctgtcgctcgagcagtcgctcgaatggatcggccgcctgcagcccaagcgcgccatcctgacccacatgcatacgccgctcgactacgacaccgtcatggccgagacgcccgatcacgtcgttccggcctatgaccaaatgagcttcgagattgaactcgaaagcccggagcgcggggactaagcctcacgcaattccggcttccgaggtggcttgtcaggtctgtgacgaacacgacgtcgtcggcagcgctcaggacctacatggccgagcgcatcggtcggacagccgaactggtgcgcagcgccaagcgccgaggcgacatccgtgccgacgtcgatccggaactgacgatcgaactcccggccggcttcgcctggagccgtttgctgaccggccggctcgaggaggacacttagcagctcgacaaggtgatccggcaggtctgcctgggattgcgcggcgacggcgattgagcctgatcgacgaagcgaagcaataagcggctgccactagatcgagccagtttcccgctaccgcatatatctttttgttccataatctatcttatgcgatatttgtatatatgtagggtgggttctatttccaactgcaacatgccaatgatttcaacggtctgttgccacaaagctgacgtttgcagcagcccgctcccttctccggaaagccgcagcgcgcatcgaccgtctgccgcccgtcgttcgcgacatcacatcctcccacggccgcacgccatcatgcccgagaaaccaggccatctgctccgccgccgtttcaccgccataagttgacatgatcagtgaagttttgcagttacatccgtgcggtccggatgtccggcgtcgcaccctatgtacgcagccggagatgccatcatgcccgccgaattcctcgccctgtcgcagatccattacgaggccggcaagaagcatattttgcgtggcgtcgacctgaagctcgaggccggtcgtgtctacgggcttgtcgggccgaatggttcgggaaagagctcgcttctgaagaccatcgcccgccaggtcgatccgacatcgggcaccgttgcgctccagggaaagccggcggcgagctggagcgggcgcgcctttgcccgcgagatcgcctatatgccgcagttcacgcccgccaccgacggcatgacggtgcgcgagctcgtcgcgctcggtcgctttccgtggcacggcacgcttggacgcttcacgaaggccgaccgcgatctggtcgaggatgcgatccggcgcacggatctcgagcgcttcgccgatagcctcgtggccaacatgtcgggcggcgagcgccagcgcgcctggatcgccatgatgctggcgcaaaacgccagctgcctgctgctcgacgagccgacctccgccctcgatcttgcccatcaggccggcgtcctgtcgctgctgcgcgaactgagccatgagcgtggcctgaccatcgtcgtcgtcctccacgacatcaatctcgcctcgcgctactgcgacgagctggtggcgctcaacgacggcaggatttcggcccgcggaaagcctgccgatatcgttcagtcggatgtgctgaagtccgtcttcggggttgatatgggcgttttcccgcaccctgtgagcaacgagccggtcagctatctgctgtagcgtcccggcgtgcgcgccggcctcgcctgacaacaacacagccggccaaccatctgacgggacaggacaaacccgatcgtcaccttaggcgaaaaccatcctcacgctaggtgaggatgtcattgtgtttacgctaggccagcttcttcgtacccgcctcgccgtcgtcatcgggcgcgcccgtctgctgcgccatgtgcagccgccgataggggccggcgcgccgtagaaggtcgcggtggctgccctcttcgaccaccctgcccttgtcgatgacgcagatccggtcggcctcggtaatcgtcgccagccggtgcgcgatgacaagcgtcgtgcgcccctcggagagctcggacagcgattgctggatcgcccgctcggtctccgtgtccagagccgacgtcgcctcgtcgagaatgaggatcggcgggtttttcaggaagatgcgggcaatcgccaggcgctgcttctggccacccgacagcttgacgccccgctcgccgatgatcgtgtcgaggccatcgggcaggccggcgatgacctcgtcgagacgggcccggcgggccgcctcgagaatgtcgtcttcggtggcgccgagcctgccataggcgatgttttcgcgcatcgtcccggcaaacagaaacacgtcctgctgcacgatgccgatgctcgagcgcagcgacgccagcgtcatctggcgtatatcgacgccgtctatggaaacctcgccgctgctcacctcgtaaaagcgcggcagcagcgagcagacggtcgtcttgccggcacccgatggcccgacaaaggcgatcgtctcgccggccttgatcgtcagatcgagcccgtcgaggattggctttccggcccgatagccgaaatgcacgttgctgtagcgaatgtcgcccgtcagccgaggcatgttcctggcatccgcgcggtcggcgatatccgggtcggtatcgagaaacgacgcgtagcgctggaagccggcgatccccttcggatatgtctcgatcaccgaattgatcttgtcgatcggccggaagaagacgccgacgagaagcaggaaacccacgaaaccgcccgtggacagctcgcccctcgtcacgtaccaggccccgacgagcatcaccaccacctgtacgagacgcatcgacagataggaaagcgaggtcgatgccgccatcgcccaataggcgtccagcttggtcgaaagataaccggcattgttgaccgcgaagagccggcgctcgtgatcctcgttggcgaacgcctgaaccacacggatgccgccaaccgtctcctcgatgcgggcgttgaaatccgcgacgcggccatagagcgcgtgccaggtcctggtcatccggccgccatagcgcgtcgtcaccacggccgccagcggcacgatcagcgcggtgacgatcgccagcggcggatgcacccaccacatgagaatgaaggcgccggccagcgtcatgatcgcaatgaagatgtcttcggggccgtgatgggccacctcgccgatctcttccagatccttggtcagccgcgccacgagatggccggtcttctgattgtcgaaataggagaaggaaagcttctgcagatgatcgaacgccttcgcccgcatctccgtctcgatcttcaggccaagcatgtggccccaataggtcacgatcagctgcaatccggcgttgacgacatagatggcgagcagcccgatgacggccagtccgatcagcccgagctgccccgtcggcagcagccggtcgatgaacagcgtgacggctacgggaaacgcaagctccagcaggcccgccgtcacggcgctgccgaaatcgagcacgaacagcccccggtgcggcctgtaatagccggcgaagcgtttcagcagcgacgatgtgctcatccgcgagcccttcccaatcaatataatatgccgcggcgcgccatcgggcgcagaatgcaactgtgtggaaaacagcgcgtcccggcaaaagccagccgcttcaaggatttgcccgatatccaaatccagcgtcaaaaagtcaagttacttcttggtgagaccgcctcccgaggttgtggctggcaggaccggcgcatcgaatccgtcgaatattcggtcatgtcggaacgtggccaaaaatttgagcatccatgtccgctttttcggcatgaattttaccgcccgataaaaatttgaccaaacgataaataaattcggtcgcgccctgccgcatggtgttgatttcattgatcttcatcaatctggcacgccgcctgcattgaagatgccgaaccagatcctggccgcgaggcctcaagaggagagcagatatggaagtcggtgttttcatcccgatcggaaacaatggttggctgctgtcggaaaacgcgccgcagtacaagccgagcttcgagctcaacaaggagatcaccctcaaggccgagaaatacggcttcgatttcgtgctgtcgatgatcaagctgcgtggcttcggcggcaagaccgagttctgggatcacaatctcgaatccttcacgctgatgtcgggactggccgccgtcaccacgcgcatccggcttttcgccaccgccgccaccctcgtcatgccgccggccatcgtcgcgcgcatggcgtccaccatcgacagcatctccaacggccgcttcggcctcaatctggtcaccggctggcagcggccggaatattcgcagatgggcatgtggccgggcgacgagtatttttccaggcgctacgattatctcggcgaatatgccaccgtgctgcgtgaactctgggaaaccggcaggagcgatctcaagggcgagttcttccagatggacgattgccgcctctctccacgcccgcaggccgatatgaaggtcatctgcgccggttcgtcgaatgccggcatggaattctccgcgcgatatgccgactacaatttctgcttcggcgtcggcgtcaatacgcccaaggccttcgcgcccgccgccgaacgcctgaaggccgccaccgccaggaccggccgtgacgtctcctccttcgtgctcttcatggtgatcgccgacgagacggacgaagccgcccgcgccaagtgggagcattacaaggccggtgccgatcaggaggcgatctcctggctcggcgttcagggcgcggccgacaccaaatccggcgccgacaccaatatccgccagatggccgaccccgtctccgccgtcaatatcaacatgggaacgcttgtcggctcgtatgagaccgtggcgaagttgctcgacgaagtgccaaccgtccccggcaccggcggcgtgctcctgaccttcgacgacttcgtcaagggcgtcgaggatttcggcacccgcatccagccgctgatggcatgccgccggcatgtcaagccgatgctggaggcagccgaatgagcgtcgcaccggcaggataccagccgccgcgcgagcgcacgcggagcgtcaccctccccgcccgccccgagccgatcacgctgaggccgagcgaaaccgccgtcgtcgtcgtcgatatgcagaacgcctattcgacggaaggtggctatgtcgacctcgccggcttcgacatctcgggcgccaagggcacgatcgcgaacatcaagaagacgctcgacgccgcccgcgctgcaagcgtccaggtcatctatttccagaacggctgggacaaggactacgtcgaggccggcggaccgggctcgcccaactatcacaagtcgaatgccctcaagaccatgcgccagcggccggagctgcagggccagctgctggccaagggcacctgggactacgcgatcgtcgacgagctgcagccgcaaccgggcgatatcctggtgccgaagacccgctacagcggcttcttcaacaccaacatggacagcgtgctgcgcgcccgcggcatccgcaatctcgtcttcgtcggcatcgccaccaacgtctgcgtcgagagttcgctgcgcgatgctttccacctcgagtatttcggcgtgatgctggaggacgcgacccatcacctcgggcccgatttcatccagcaggcgaccgtctacaacgtcgagaaattcttcggctgggtcgccaccgtcaacgatttctgcggcgtcatctctcaagcagcgccaaccgaagcctgatcaggaacagaagaggacacatcatgccaaaatcgatcatcgtccccgagggaacgcagaagccgatcgccccctattcgccaggcacgcttgccgacggcatcgtctatgtctccggcacgctgcccttcgacaagaacaacgatgtcgtccatgtcggcgacgccggcgcccagacccgccatgtgctggagatcatcaagtcggtgatcgaaacggcgggaggtacgatggaagacgtgaccatgaaccacatcttcgtcaccgactgggccaactaccaggccgtcaacgccgtctatgccgagtatttccccggcgacaagccggcccgctactgcgtccagtgcggcctggtgaagccggacgctctggtcgagatcgcgaccgtcgcccatatcggcaagaaatgaccgggatgcatttcgacattcatggccagacccatgccggcgctcgcaccatcatcctgtcatcgggcctcggcggcgcggccggctactgggcgccgcagatcgaggcgctgtcagctgacttccgcgtcgtcacatacgatcatcgcggcaccggccgtaccggcggcgagatgcccgaggcgggcggcatcgccgccatggccgacgacgtgctggagatcgcgctggctctcggcctcgagcgcttcgacttcatggggcatgcgcttggcgggctgatcgggctggacctcgcgctccgccggcccgacatgatcggccagctcgtcctcgtcaacgcctggagcaaggccgatccgcactccgatcgttgcttcgatgtcaggattgaactgttggagcggtcgggggtcgagatgttcgtcaaggcgcagccgctcttcctctatccctcggtctggatgtccgaaaatgccgagcgtcttgatgccgaggagcggcacgccattgcccatttccagggcaaggccaatatcctgcgtcgtatcgcggcgctccgggccttcgatctcgatcaccggctgtccgacatcgccgcccacacgctcgtcatggccacccgcgacgacctcctcgtcccctgcacccgatcggtccgcctcgccgagggactgccgcacgccgaactggctctgacggacttcggcgcgcatgccgtcaacgtgacggagcccgagaccttcaacgacaccgtgctgcgcttccttcgtgacgcgagatccgaaatccgctaggacccagatatgcaagcatcagccaaaatgatcccagaagcgccagcgacaatcgcggatgctgttcccgaccagcgcaagcaggaataccgcaacgccatggcccgcctcggcgccgccgtcaacgtcgtcacctcggacggtcctgcgggcctcgcgggctttgccgcaaccgccgtctgcagcgtcagcgacgatccgcccaccctgctcgtctgcatcaatcgcggctcctccgcctaccccgccgtcagcgccaaccgcgtagtttgcgtcaacaccctgtcgcacgcccatgaagagctgagccggcgcttcggcggcaagacgcccgtccgggagcggttcgaaggcgccagctggtcgtccctcgcgaccggggcgccggcgctcgacgacgcactgatctcgctcgattgcaaggtgaagtcggtctccgatggcggcacccacgacatcctgatctgcgaggtggtcgccatcagggaaagcgaaggcggccgggcgcttatctacttcgatcgccgctatcacacgatctgatccggcttatggaacaagagcttaggtcagcgcgttccctgccggaattccgggtcgtcccgtagcgtaacctgccgttgcgtcacgagcatgatcggcccggatgaacagctcggagacgtcgatgccctggatcgcctttatcgttcatttcttcgccgcagccatcatgaccaacggcattccgcatttcgtcaacggcgtctgcggccgcccgtttcgcacgccattcgcgcgcgggtcgggcgccggggaaagctcggcggaactgaatgtcgtctggggctggacgaatttcgtcatcgccttcctgctgtttgccaatgtcgggccgctctatatcggcacgcccatcgacaccattttcatcgccgccggcgtgctcgtcgcgggcctgctcctgtcgcgaattttcgcacgcggccggctctgattgccctttccttgcgcgctgaaagccctactatccaaggggtggcggccatgcgccgcggatagtgggagatatgccgatgcgcgccttcttcgcagtcctcatcctcggtctcaccgccatcgtcacgctgtctccggcgcgcgcgcaagaccctctggacaccacgcggtcgatgatcgaggcgcagatcaaggcattcctgcaggacgattccgaaaaggcctattcctatgccgcccccggcatcaaggccgcctatcccgacaagaacctcttcttcgccatggtcaagaagagctacgagccggtctatcaccccggaaactacgccttcggccgcagccgctcgatcgacaacggcgcgatgatctaccacgaggtgctgatctccggccgcgacggcaaggactggacggcgatctaccaggtcatccgtcagccggatggcggctacaagatcggcggcgtccagatcctgccggacactgagagcaagggtatctgagttcagacgggttcgagatcgcccctagcccactccgcttccgtctccgccatgaaatcggcgaagcggccttcggcgatcgccttgcggatgccctgcatcagttcctggtaataggagaggttgttccaagagagcagcatgccgcccagcgcctcgttggagcgcacgaggtggtgcaggtaggcacgcgagtaatcacgcgtcgccgggcagttcgactgctcgtcgagcgggcgcatatcctcggcatggcgcgcattgcggatgttgaccttgccgcggcgggtaaaggccaggccgtgacggccggagcgggtcggcatcacgcagtcgaacatgtcgatgccgcgcgccaccgagcggaggatatcctcgggcgtgccgacgcccatgagatagcgcggcttctcggtcggcaggaccggcagcgtctcctcgagcatcttcagcatgacagcctgcggctcaccgacggcaaggccgccgaccgcgtagcccttgaggtcgagatcggcgagcgctgctgcggagcgcacgcgcagcgccggaatatcgccgccctgcacgatgccgaacatcgccttgcccggctggttgccgaaagccaccttgcagcgttcggcccagcgcagcgacatctccatggcgcgctcgatctcgcgcggctcggccggcagcgccacgcactcgtcgagctgcatctggatatcgctgtcgagcagcccctggatctcgatggagcgctccggcgacatgtggtgcaggctgccgtcgacatggctcttgaaggtcacgccctgctcgtcgagcttgcgcaggcccgagagcgacatgacctggaagccgccgctgtcggtgaggatcggcccatcccagcggatcagcttgtgcagaccgccaagcctggcgacgcgctcggcagtggggcgtagcatcaggtgataggtattgccaaggatgatgtcggcgccggcgtcgcgcacctggtcgagatacatcgccttgacggtaccgacggtgccgacgggcatgaaggccggcgtgcggatcgtgccgcgcggcatggagacttcgccgaggcgcgcgccgccatcggtcttcttgagggtgaactggaagttctcggtcatctagtctttccggaaaagaaggctggaatcgccataggaatagaagcggtagcctgtcgaaatggcatggtcataagccgcgtgcatggtctccaggccggcgaaggccgaaaccagcatgaacagcgtcgagcgcggcaggtggaagttggtcatcagcgcgtcgaccgccttgaagcggtagcccggcgtgatgaagatgccagtggcgcccgcccagccgcggatctcgccgctgttctgcgcggcactttcgatcagcctgagcgacgtggtgccgacgcacacgatccgcccgcccctcgctttcacggcattcagcctggcggctgtctcgtcgctgacatagccgctttcgagatgcatcttgtgatcgtcggtgtcgtcgaccttcatcggcaggaaggtgccggcgccgacatgcagcgtcacgaaatgccgctcgatgccggcctcgtcgagtgccgcgaaaagctccggcgtgaaatgcagcccggcggtgggcgcggcgacggcgccgtcctcgcgggcatagatcgtctggtagtcggcgcgatcgcgctcgtcctcggcacgcttggcggcgatgtagggcggcagcggaatatggccgacggaatggatgacctcgtcgagcgcagggcccgacagatcgaagacaagcgtcacctcgccgccctcgcctttctcttccacggtgcagtcgagcgcgccgagcaggcagctctcgccgctatcgccgaaggcgatccggtcaccgaccttgatgcgcttgcccggcttcgcgaatgccttccagcgattggcgccgacccgcatgtgcagcgtcgccgaaacctgctggccgcccgcaccctcccggtggcggataccttcgagttgcgccggaatgaccttggtgtcgttgaacacgagcgcatcgcccggcttcaggaacgacggcaggtcgcaaacgcggtgatcggagagttgcgcttcgcggtgcgggtcgacgaccagcaggcgcgcgctgtcgcgcggctcggcgggccgcagagcgatccgttcatcgggaagctcgaaatcgaaaaggtctacgcgcatgaaggcagttccgggaaggctggtccaggcaaagcgaaacccgccccgcgctctcgcgcaagggcgggtttcagcagaaatcacaatcagacgtcggcggcaacccgcatcgagacgatcgaatccggatcgacgaccggttcgcccttcttgattttgtcgacgttatccatgccttcgatgacctggccccagacggaatactgcttgttcagccacggagcgtcggtgaagcagatgaagaactgcgagttggcggagttcgggttctgcgaacgggccatcgagcaggtgccgcggatgtggctgacggccgagaactcggccttgaggtccggcttctcggagccgcccatgccggcacggcccgggttgaagctctcgctgcccttcttgccgaacttcacgtcgccggtctgcgccatgaagtcgttgatgacgcggtggaacacgacgccgtcataggccttctcgcgcgcgagttccttgatgcgggccacgtgctcgggcgcgacttcgggcagaagctggatgacgaccttgcccttggtggtttccaggatgatggtgttttccggatccttgatctcagccattcttattctcctactggtcttgaaacttacttcttggcgatggtgaccttgaccatgcggtcgggatcgctgacttcgccgttctggccttcgcccttcttgatcttgtcgacgttttccatgccggagatcaccttgccgacaaccgtgtactggccgttcaggaaggagccgtcggcgaacatgatgaagaactgcgagttggccgaattcgggtcctgcgagcgcgccatgccgaccgtgccgcgcacgaatggcgtcttggagaactcggcctgaatgtcaggcatgtcggaaccgccggtgccgacctggttcttgtcgaagcccttttccatgttgccgtactgcacgtcgccggtctgcgccatgaagccgtcgatgacgcggtggaaggcaacgttgtcgtaggcgcccttcttggccagcgcctcgatctgggcgacatgcttcggcgcgacgtcgggcgcgagttcgatcacgacgggtccgctcttcagctcgatcgtcatcgtgtcggcggcgaaagcgtcgccaacgaacgaagcgagatagagcacgccggcaaatgcaatataaaacagtttcatgtgagctccgttgcggcgaattcgcctaggatttgcgcttggattgaagggctttcaagacggcggcaggcacgaaagcactgacatcgcctcccatgcccgcgatttgccggaccaatgtggcggttatgggccgcgaggccgtgccggcgggcagaaaaacggtctggatatcgggtgccatctgcctgttcatcccggccatctgcatttcgtaatcgagatcggtgccatctctcagaccccggatcagcagggccgcgccatgcgctcgggcggcatcgacgacgagattgtcgaaggacaccaccgacacatccgacgtccgctccggcaacgcctcggccagcgaccgacggatgagttcgcccttctcctcgaacgaaaagagcggcgtcttgcccgggtgaatgccgatcgccacgatcaccttcgacgccacgttcagcgcctgcacgagcacgtcaacatgtccgttcgtgatcgggtcgaaagaccccggatagaaagctgtcgtcattggccccggccatttgtttcgacgccttttgtcacggataggcccttgccgcaagtcatttgccccggacgccggcggcgcgcgcgagggcgcggcgggcgactgaatgccggatgaacgccccattcaaggccgcttcagccgcgatccttataaccggatgcatcaacgccgccgatgccgtcagggatcggttcacttctggaaacccaagatgctcatcctccttgtcatcatatcagtcgctctctccctcgccgccgaatttctctacgcctacatcatggagatgcgcgacggtgcgtgggtgcgccgggacgtcagggaacatcacgagatcgtgcgcgttatgggtcgcgtctcctttaaaccgattagagaagacgcataaaccgatttaggaagatgaacgccagatgaacgaggcattcaaagaggcttcagatcggcgttggtaaacgacttgtcaatgtcctgcggaaccaaatccaaacggacgcgttctttcaatcgaagcgttgcgcaaataggcgctacaaggaagataaatatgccaaacaagattaccatgattaacgcagtatggatggtaatgatgaccggtatgcttgcagcaactgttgcgctttatgatcagaaggtagaaacgtccaaagtatacggcccttacgcatcggcccgcacctccgttgtgagccaatactgaggggcgtgaaagcaaaatcctggaggattgcttatgttcacgatcttgactgtgcttactgcccttatcagcatcatgtttatcgtatctgtggcatcgaccgtgaccgccctgcggcgcgaaaccgaggaagataagagactgcatggaaagcatagcgtcttctgatcggccctgagcagcccgacagctgaaatacgaaaggccgagcgtgtcccagcgctcggccttttcgtttcttgaacgcgacgagcggccgaatttcgatgaacgaccgggaagattattgtgtgatccgcctgaccatgatcacgtcgtcgatctcgcgaccgccttccatcacgcctccggggatcagccccgcctgtacgaaccccgcgttccggtaaaagccgatcgcggccggattttcagcgctggcggtcaattcaagctggcggataccctgctgccgggcgtggttcacgagatggtcgagcagctcgcgcgccagaccggtaccacgcttgtcccggcgcacatagaccatcacgatcgtcgcgcgatgcgccatcttgcttgcccgctgcctgatcagtcccatgatcgccacgggctcctcgccgtcgaaagcaagaaagacggcgtcggcaagcagtcgtcgccgccattcctcgtcggcaagctccgcccaatcctcgaaactgctggcgaaagcggccggctccatgcggagcgcctcgagccggatgcgcttgaacgcctcgacatcgtccgcgcccaaaatcctgatcatgccagcctccgaaacggcttcccgatcgatcagatcgacgtcagcgtccagtcgacgatctcggtggtgacgctcgcaaaggcacggtcaagcgccttgacgaaggcctcgttcgagccgccgccggtcggcaccgtctgcgaaaacaccttctgcccccggaccgagccattgcgatcgttgacgatcttggccgagatttcgacgacggcctggctgccgccacctgtgcggatctcgaaggcgcggatgtcggtgatcacctgatagtcgatcgccagcccctggccgggaacgccgacaccgccgaccttgccggaattctcataggcctcgacgagcttggcctgaaccatgcgcggcagcttgtcgctccactgcgccttggcaagatactggatctccgaagacgagaccttgatgacgatctgctcgctgttcagcgcctgcagcgccgtcggctgctgcaccaggatctggcgccccttcgccgaaggtcccgcgccgcttgccggcgccgagagatcataggtatcgttcttggccgctgtcccgcagccggccagcgcagcggccagcaacggcatggcgatcatgcttttcatgagccacgagcgagacaccactatatccgacacagccatatgctgacttcccctgttaacgcctggtccggccgtcatactgcttgaccgtgtccccgccgaagatcaaccgctgcgggtccttgtcgaaattgctgatcgcatcgttcaaattctgcactgtcaggcgcgcgtcgttgaccagcgcctggacgttctgcaggccgccgctcgagaacttctgcagattgtcggctataggtccgatgcggctgttgagattgtccgccaccttcttgaaggattccagcgtgtcgcgcgcctgcgtgaacatcgactgcgtgctgtcgtcgccgagcagcttgtcgaccttcaccagaatgccgtcgacgcgggtcgatgcggcgttcagcttgttggccatctcggtgacgttctggatcgtcgaatcgacgtctctgcggcgcgcgttcacggtatcggcgacatccttgatcgaggcgaccgccgcgcgggcatccttggtcgtctgcgcgatatcgtcgatggaacccctgaccttggccggatcgatctgcgccaccagcgtgtcgaccttgtcgagcgtcgcctgcgccttcttgccgaagtcgttgtaggtggtcgccgtctcctcgaatttctggatggcgtccttcaggccgcccgacgcgtctgccacattgcggctcaccgtttccgcattggacaggatcgtgtcgatcttcttggcatccacagtcttcaccagcgattcaatggccgcgagcgtcgagtcgacgcggccggagacgttgcgcacggtgtctgacaactggcccacgctctgcaggaagctgtcgatattgccggaattcttggccagcgcgtccgagaaggtctcggcgttctgcagcgttttcgtcagcggtccacgggcatccttgacgaagccctgaacctggccgacggcatcgttggcacgctcgagaatcttgtcggccgtggacaaaaggttggtgacgctcgactggtcggcgacgatgaccgcgcgcttgccggcctcggaggccgcctgcaggatgttcttctccccgacgcggccgcccgacagctcgacataggcagcccccgtaaggccctggatctcgaggaccgccttggtggtcgggtagatcggcgcatcgacacgcacttcggtgaaggcgagcgagaactgcggatcatcggcgtcgatagacagcgactgtaccgaacccacctggatgccgttgaagcgcaccggcgagccgacgctcaacccgttcgccgagcccggaatgcgcacgataagctcggccatcggtccgccgcggccgtactgggccatccagtaaacgaagccgaaggctgccgcgatgaccagaaccgtaaagaagccgacgattgtgtagttcgctttggtttccatcttatccgctcacttcccgcggctatcttgcgccagcctgatgtcggctgatgcgtggccattctgcggcacgatcgaacgcgcgcgcttgcccttgaaataagcctgaacccaggggtcgtcataggccagcatgtcttcgatcgttccctcgaccatcaccttcttcttgccaagcaccgcgatacggtcgcaaaccgaaaacaggctgtcgaggtcgtgcgtcaccatgtagacggtcagaccgagcgtgtcgcgcaacttggcgatgaggtcgtcgaattccgacgcgccgatcgggtcgaggccggaggtcggctcgtcgagaaacaccagttccggatcgagcgccagcgcgcgcgccaatgcggcacgcttgatcatcccgccggagagctccgaaggatatttgtcggccgcgtccggcgccaggcccaccagcctgatcttcagatgcgccagttcgtccatcagcgccggcggcaggtcgagatactcgcgcatcggaacctggatgttctccttcaccgtcagcgacgagaacagcgcgccctgctggaagagcacgccgaggcgcatgtcgagcgcgttgcgctgcggctcgtcgagctcgtcgaagtcctggccgaggatcttgatctgcccggagcggcgcggcagcaggcgcagcaccgtgcgcatcagtaccgacttgcccgtccccgacgcaccgacgaagcccaggatctcgcccttgtagatattgaggttcagattatcgagaacgatcttcgacccgaagccaacggtgacgtcgcgcgctgaaagcacgatgtcccgccctgcctcgtccttggtcgtcgtttgctgctcgtccacgcaaaatccctaaaaattaatagctgcatagaacatggcgaacagcccgtccatgagaatgaccacgaagatcgccttcaccacggccgccgtcacgtgctggccgagcgattcggcgctgccccctacctttaagccttcgacggcggcgacgataccgataaccagcgccatgaacggcgccttgatcatccccgacagcacggtcgacagcgtgatcgcctcgtgcaggcgcgctatgaagttggcgaaggtgatgcccgaataggcccaggcgacgacggcggcgccgaacagcgaggcgaaattggcaagcacgctcagaagcggcagcgccacggtcagcgccaccagtcgcggaaagatcaggacgccgatcgggttcaggcccatgaccttcagcgcgtccacctcctcgcgcatcttcatcgagccgatttcggccgtgatcgcgctgccggaacggccggcgatcatgatcgcggtcaaaagcacgccgatttcgcgcaattgcagaatgccgacgagatcgacgacgaacacctcggcgccaaaatagcgcagctggaaagcgccctgctgggcgatgatcgcgccgatcaggaacgacatcaaaaggatgatcggcacggcgcgaacgcccatatggtcgatctggttgacgatcgacgctggcgaaacgccgctgccgcgaccgaatttcatctgcgcgccgcgcaccgccgatccgaggatgtacatcgccgccgcgagattgttccacaggtcgtacatcatccggccgatcggagcgaaaatccgttccggcagcgaaagcggcggaacctgctccacctccggcttcggccgttcctcggaaaacgattcgagcagttcgtcgatatgcggattgctgccctcgatcgtcatcgtgccgccggcactctcgacctgcttcctcagccggcacagcagccagacgccggccgtgtcgatatcggtgattcccgagagatcgatcgtcaggttcccgcccttgcgggccgaaagcttgtcgaaatccttgagaacgagatgtatgttggcgcttcgccaattgccttcgagatgcacgagtgtatccgaaccctgtgcttggtcgtccacgtgcagtgaggcggcgttacggttctcggacttcaaaatgcttgtgtctctcaaggcttacggcgacattgccgactcgcgaacacaggtccgcagcgttgagccaatataacgatgccgcaccagatttccatgcttgcaggattgcatttatgccacggtcacttgaaattcagacggactcatttccaatcgcgggtacattcacgatctcgcgcggcacgaagaccagcgccgaggtgatcgtctgcacggtcggcgagcacggtttctcgggcagaggtgagtgcgtgccctatcgccgctacggcgagacgatggaaagcgtcggcgcgcagatcgaagccgcgcgcccgctgatcgaggcaggcctctcgcgcgccgatctgcagcaggccatgccgcccggcgccgcccgcaacgccgtggattgcgccctatgggacctcgaagccaagcaaaccggcacgtcggtcgcggccatgcttggcctggccgcgccgcattcgctgaccaccgctttcacgatctccctcggcgagcccgaggtgatggccgagcacgcccgcgccaacgcggcgcgcgccctgctcaaggtcaaggtcggcaccggagacgacgagagccgcatccgcgcggttcgtgcggccgcgcccgatgccgcgatcattctcgacgccaacgaaggatggccggaggaacgcctcgcccaccatctgcggatcgccgccgaatgcggcgtggcgctggtcgagcagccgctgccggccggccgggacgaactgcttgccgacatcgaccgcccgatccttgtttgcgccgatgagagcgtccaccataccggcgatctcgccagcctgcgcgaccgctacgacgccatcaacatcaagctcgacaagaccggcggtttgaccgaggccctggcgatgaagcgcgaagccgagcggctcgatttccgcatcatgctcggctgcatggtcggaacgtcgcttgccatggcgccggccgtactccttgcccaggatgtcgccttcgtcgatctcgacggaccgctgcttctcgcccgcgatcgcgagccgggcctgcgctatgccggctcgctcgtctttccgcccgaatccgcgctctggggctgaagataataggcgacgatgatcagtccgagccccagcaccgccgcaagcgccatgacgtagtagctcgccaggccgagcagcgcgtagatatagccggaggcgatggtcatcagccccatgaacatgccgttgtagaagaaatacgcgccctgcgccgacgattcctgcgccgcctgcaccgaggcgatgatgcgccgctgcacgccggtatgaacgaaggcatagctgaaggcgtgcaggcactgcagcaggaagaagccgacgaagccccattgcatcggaaacagcagccagcggcagacacagatggcggcgccgacgcggatcagcgtccaggcgtcgaaatagcagcagatcctcttcgactggaagaacacggtgacctcggcggcgacccccgcgctccacagcaccgcgatctcggtgccggaaaatccgagatcacgccaatagatcgtggcgaagacataaagcagcgcgtggctcgattgctggatggcgacgccgatgagcagcaccagcaaatgcggctgccgaagcgaactgccggttgcctgctgcagatcgacaggcgtaccgcgccgccgcgtcggcccgatgcgcggacagtagaccgccatcaccatggtcatcaggaagccgaagatcatcacgggcagaaccatctgcccgccccagtttccgatcagccggccgccgaccagcgtcgaggcgatgaaggcgatcgagccccagacccgcatcgagccgtagtcgaaaccccagcgccgcacgcccgagatgacgatcgattcgaccacgggcacatagggagaaaaggtcgcgccctggatcgtgtagacgatcagcaccggccagaaggtgtcggtccagtagagcgcgatcgccgtcaggagcgacaggccgccggaaaacaccagcacgtcggcgcgttccttcatcctgtcggcatacatcgcgacgacgggcgccacgagaacgcgcaccaccatcggcacggccaggatgatgccgatttcacgatcgctgaaatcgtgcatcgccagccagatggggaaaaacggcagcgcgacaccgttcacgagcagtggcgcgcagtaggacaaagcgctcagcagccggaaatgggctggcgcggcctcggtgaaggaggctttcgtggcgggaatcatcggtgtgacctgaaaggaacctttgcgttgcctaacatgtcaccgtaagcgcgaccaaggcgagaaaaggtcgccccaaaccgatttcaaaaataagccgaagctgtcgcgaaacggcaacggcagcacccgcacaattccgtttcgcaacagcgagatatcagggcgctaagctgcctgctgcgccggctcgcgcttgcgatgatcttcgagcgccagcggcgccggagctagggcgccacccatggtgcgccattcgatgagttcgaaggtgccgtcttcgtgttcggcgatcgccgtgcagctctcgacccagtcgccggtgttgatgtagcgcacgccgtccatgtcttccatgacggcatggtggatgtggccgcagatcacgccgtcggcgccgctcttgcgggcttcctcggccacgaccttctggaactcgccgatgaagttgaccgcgtgcttgacctgcagcttcgcccaggccgagaacgaccagtacggcatgccgagcttgcggcggacagcggcgagcccgatattgatcatgatcgccatgtcgtaggcccagtcgccgagataggcgagcaggcgggcattgcgcacgacgacgtcgaattcgtcgccgtgcagcaccagatacttcttgccgtcggccgcttcgtgcatcatccgctcggccacttcgatgccgccgaagtgcatgccggggaagtcgcgcaggaattcgtcgtgattgccggggatatagatgatgcgcgtccccttgcgcgccttgcgcagcagcttctggatcacgtcgttgcattcctgcggccagtaccagctgcgcttcaggcgccagccgtcgacgatgtctcccacgagaaagatcgtgtcggcttcatggtacttcagaaagtcgatcaggaagtcggctttcgcggctttcgagccgagatgcacgtcggaaataaagagcgtacggaagtggcgggtatccatattgtccttcacaagcatcctgcccgtgccccatgcttcatctgtgcccctgaaaaccagactcgtgtttcaggatgatgacacgaacgtgatcggcggcccttgctgaccaatcggcggcatcacgcgggcgcggttcgacatttgcgcaatttttgagaacaggaaccgaaattcccgctgttaccgcctttcgattgatgtattgaaagcgctccaatgaaagcatgtgcggcagcccggagcattacgatggatcacagcgacaaaccgaagacggacaacaaggcggcaggcggcagcctcgatgaacaggcgttgttcttccaccgttatccccgtcccggcaagatcgagatccaggccatcaagccgctcggcaaccagcgcgatctggcgctcgcctattcgccgggcgtcgccgccccctgtcttgccatccgcgacaatccggaaacggccgccgactatacgtcgcgcgccaacctggttgccgtgatctccaacggcaccgccgttctcggcctcggcaatatcggcccgctggcctccaagccggtcatggaaggcaaggccgtcctcttcaagaagttcgccaacatcgacgtcttcgacatcgaggtcgacgcatcgaccgtcgaccatatggtctcgaccgtcgcctcgctggagcccaccttcggcggcatcaatctcgaggacatcaaggcgccggaatgtttcgagatcgagcgccagctgcgcgagaagatgaagatcccggttttccatgacgaccagcatggcaccgccatcatcgtcgccgccgcgatcctgaatggcctggagctcgccggcaagaagatcgaggaggtgaagatcgtcgcctctggcgccggtgccgcggcccttgcctgcctcaatctgctggtcaccctcggcgccaagcgcgaaaacatctgggttcacgacctcgaaggcctcgtctacgaaggccgcgtcgagctcatggacgaatggaagagcgtctatgcgcagaagagcgacacgcgtacgctcgccgaaaacatcggcggcgccgacgtcttcctcggcctgtccgccgccggcgtcctgaagcccgagctcctggcgcagatggcggataagccgctcatcatggcgctcgccaacccgaaccccgaaatcatgcccgatctcgcccgcgccgcccgccccgacgcgatgatctgcaccggccgctcggacttccccaaccaggtcaacaacgtcctctgcttcccctacatcttccgcggcgcgctcgattgcggcgccgtcacgatcaacgaggaaatgaagatggccgccgtgcgcgccatcgcggcactcgcgcgcgaggagccgtccgatgtcgccgcccgcgcctattcggatgaaacgccgatcttcggccccaactacctgatcccctcgcccttcgatccgcggctcatcctgcgcatcgcccccgccgtcgccaaggctgcggccgacagtggcgtggcactgcgcccgatcgccgatttcgatgcctatctcgaccagctgaaccgcttcgtcttccgctccggcttcgtcatgaagccgattttcgcggcggctaagaatgccgacaagaagcgcgtcatcttctccgaaggcgaagacgagcgcgtgctgcgtgccgcccaggtcctcctcgaggaaggcatcgccaagccgatcctgatcggccgtccgcaggtcatcgaaacacgcctgcagcgctacggcctgcgcatccgtccgctggcggatttcgacgttatcaatcccgaggacgatccgcgcttccgcgaatatgtcgagctctatttgtcgctggtcggccgccgcggcgtcatcccggaagccgcccgcaccatcgttcgcaccaacacgaccgtcatcggcgcgctggcgctgaagcgtggcgaggcggacgcgctgatctgcggtctcgaaggccgctatgagaagcacctgcgcgatgtccgcctgatcgtcggcaagcgcccgaatgtccgcgatttctcggcgctcagcctgctgatctcgcagcgtggcgccaccttcttcaccgacacctatgtcacgttcaacccgacggccgaggaagtggcggaatccgccgtgctcgccgccgaggaaatcaagcgcttcggcatcacgccgcgcgccgccctggtctcgcattcgaacttcggctcgcgtgaatccgagagcgccaccaagatgcgcgacgccctgcagctcgtgcgcgagaccgcgcccgatctcgaggtcgatggcgagatgcatggcgagagcgcgatttccgaaacgctgcgcaagcgcgtcatgcccaacacgacgctgcacgacgaagccaacctcctggtcttcccgaacctcgatgcggccaacatcacccttggcgtcgtcaagtcgatgatcgatggcctgcatgtcggcccgatcctgctcggcgcggccatgcccgcccatatcctggcgccgtcggtcacctcgcgcggcgtcgtcaacatggccgcgctcgcggtcgtcgaggcctcgcaacccgcctgatctggccgcctgatttggcccgcgcggatgtgtaccggcgtgatttgccttgaacgccggaaatgcgttaggctttgagcggcagcttgttaagacaagcaggttatatcgaagggcgggccatggtccgcccttcgccattcggtatttgctcactgacgggacgatgccttgatccgcctcaatatggccgcagcatttctgattgccctatccgcccccgcctatgcgcagatggcgccgatctgcggccaattgcgcgctcgtctcgccaccgtacccgagacgatcggcggcaactcgcccgaggtccgcaggttcgccagcgccatcgccgagcagaacatcgagcttcgcaaattgcgcagcgacctgcgccgcaacggctgcagcagcggcagcatggtgatcatcggcggcgacaatgccggctattgcggcgagctcgatcaggccgaagcgaagatgctcgacaacatcgccaacctgcagatgcgccgagaccagctgcgcgcgcaaagccccgacgcccgcctgcgcaacgagctgttcgcggccctcgatgaaaacaactgcaatgcgccgatgcagcagtatgacgaaccgcaatatgcgagcccgcccagcatcgacgatcaggcgatgcgcgatgacaccttcattccgctcggtggcgagcggcagcgctcctacacgttctcgccgagtggccagccgctctccaatctgaataccgtctgcgtgcgcacctgcgacggcggattcttcccgctccgctcgaacgccacctccttcgatttcgcccgcgacgccagcacctgccagcagatgtgccccggcatccagacggagctcttttatcgcgacgtctccagtggcgagacggacagcatgatctcggcctcgtcaggcgctccctatagcgccatgccgtatgccttcgcctacaagaaccgcaagcccggcgagacgtcgtcctgcagctgcaatctgcccgcctattacgaacagatgcgccgcaaccagcaggtcggcgagcctccgccacagcagagttcgatcacatcgatcgaaaccccgaaacccgccatcgccaagcccgagagcaacgcgacgccgcaacagccggcgccaccgccccagccgcaggtccccgatcgtccctacgatccgacagccggcaaggtgcgccaggtcggcccacagttccttgccggcgaccggggtacgatcgacctcaagaaccccgccatgccgggcgcgcagcagcaacagccgccggcacccgcgccgaagcggtaggggcatcgccggctacacgcccccgccccagcgatccgcaaacaccagctcgtccagcggcaaccgctgccgccatcccttcgcggcgagttccggctcctcgtaaagccggtcgacatagccaacgcagagccaggcgacgatctcgatccgctcaggcacgccgagcgcgcgcttcagatccctttcgtggaagatgctgacccagccgacgccgacgccttcggcacgcgccgcaagccacaggttctggatggcgcagacggtggagtaggaatccattcgcatgttgtgcgtccgccccagcaccacctcgccgcagcgatccggatcgcaggtcacgcagatgccgacgggcgcggtgcgaatgccctccagcttcaaggcgcggtaggcctgctgacgctcgccggaaaacatctccgcggcctcggcattggccttggcgaaagcctcccacacggccgatcgcacggcctcgtcgcgcaccacgatgaaattccacggctgcatgaagccgaccgaaggcgcgtgatgggcagccgagagaagccgcccgatgacgtcatccggtaccggatcaggcagaaactccgatcgcacgtctcgtctggtctctatggctctataaacggcgtcgcgctcgctcgccgaaaaggcaccggcgctcgtgagagagccagattggtctggtcgcatcgtcaatccccaacaacacaaccggccgctgtccaggcggtcagtctatggatgtcgggccggtcttctgacttggcttcatccgtctgcggcaccttcccggcaaatcgccagtggcatcaagcggcagacgtcggccttacagcgttgggcacgttccggtcttgcaccgaattcccgattctcccgcaagcgcgcgggcacccgacgcgccacctatgccgacaaaccgcgccggatgcaatcgctcaagcttcgaccgggaaatatcggacataagcgaacgcgtcaccgtcaggtgaccagttcggaacattgatcgacccctgcccgccgaagagcgtaaacagcgtcgtcaggttgctgccatccatatccatgatccgcatccgcacatgcttgtcgcgcgggtgatcgaagacatcgggatcgtaggagatgagcacgaccttgtcgttcctgggcgatggatgcgcgaaccagttgccgtaatcgtcgtgcgtcacctgctcgacgccggttccatcagggcggatgcgccagatctgcatcaggccggtgcggctggaattgaagtagatccagcgtccgtcggccgagtaatccggcccgtcattgcgcccctcgccatgcgtcagccgccgttcctcgccgcctgtgacgtcgatcgtgtagatgtcgaagacgtcgtcgcgaatgccgcaataggcgagttccttcccgtcgggcgaccagccgtgccagtaggagggatgattggtggtcaccaattgtggcgtgccgccatcgatcggcagcgtgtagatcgccgatttgccgaactcaatcttgtcggaaatgacgatcctcgtgccatcgggcgaaatcccgtggtcgttgttgcaggccgtcgcgaaaccggtatcgaccttctccaccttcgccgatccgtcgagcgccagccggtagagcaagccttcgtcgttgagcagcagatagcttccgtccggggcgtaattgggcgcttccaccagcctctcggtctgccagatcacacgggtctcgcccgtcctgatgttgtggatctcgacggaactgcgcatgcaaacctcctcttacgcgaacaccttaaagacctacgacagctaaatcgggcgcgcaaggatcgcgcagtcgcggcgtcgcccggccctgccgccgtgtccatctggcccgggacaaccgggcgtcgagaagtttgtgatcaaaaaaacgttaaggccgggaaacaaccatggttcatctggcgttcatgacaaagatgtgacagttcgatgacattatcatgacgctggagttccgacattgatcgcgcaagttttaaggtccggagcggcaatgcgcgaggcggtgctctatggtggcgtcggctcccaaacccgtccatccatcctgcgcggctcgatcgcggtcgccctgactgcggtgatggcgctgctcgcgacgttctctgtcgaagtgatctcgcgcggcggcgtcaccgatgtcggcgccttcctgacgtcgatggcccgtccgggaatgacgacggtcgtcatgttgacggtcgtcatgctgtgcgtcgatgcggcgctcgggcgacgtttcctgtcggcgctggtggtcctgccgctcgtgctggtgccggcgctgatatccaaccagaaacagcactatctctccgatccgctctatccctcggacatgctgttcggccgccagatcctcgaactgcttcccgtcatggtacgcgaccggccgatgacggcggtggcggtggccgtcggcattctgctctcggtcaccggtctcctgcttgcctggcgccatgcctggcgccgcctgccgaagatgacaagccgcaatcgcatccgtaatctctgcctgacggttcccgtcatcgccgccttcggctcgctgatggattactcgcagtattcctatattcgcgaccgcctgcaggtcgtgccgatgatgtgggatcagaaggagaactaccgcagcaacggcttcatcctcgccttcatcttcaacatacccatggccgacgtcgcctcgcccgcgggctttggaacgcaggcgctcgacgcgatcccgtcgcgcaattacggttacatcaaggggccgagcgacaagcccgacgtgatcatgctgatgagcgaatccttctgggatccgacgcgcctgaagacgctggagttccagcaggacccgatgccgaccattcgcgccgcgcagtccggccacgtcttctcgccggaattcggcggcatgacctcgaatgtcgaattcgaggcgctgaccggcttctccaacgccttcctgccctatggcagcatcccctaccagcaatatatccgcaacgacgtcccctcgctcgccaccttcttccgtggcgaaggctatgccgcccgtgcgctccacccgttcagcggctggttctggaaccgcaacgaggtctacaagaatttcggcttcgaggagtttcgcaccgaggaaaccatgccggccatggaaaagcgcggtatcttcgcttccgacgacagcctgatgcgggagatcatgcaggaggccgacgggctcgatcagcccttcttcttcttcggcgtcaccttgcagggacacggaccctacgaggccaaccgctatgccagcaacacggtcgacatcgccggcagtctgaccgacgccgaccgcacgacgctcggcacctatacccagggcatcaaggaggccgacgacagcttcaggatgctgaccgaatgggcgtccaggcgtgatcgcgagaccatcatcgtgctctggggcgatcatctgccgccccttggaagcgtctataccaacaccggctacatgcccgatcaggtcgcgacccgtcgcgcctccgtcgatgtcatgaagcaggaacacgagacgccgctggtcatctggtcgaacaggaagggcgtcaagcaggatgtcggcaccatcagcccgtcgcagctgccctatcacctgctgaaattcgccggctacgagcaccccttctacaccggctttctcggccgcgtgcagaagaaatacccggtcgtcgaccgctaccagctgatcgcccgcgacaacgccgcctcccccgactggatccgcgacgccaagaccgtcgatccgctggtccgcgactaccgctacctgcaatacgacgtcatgttcggcaaggggcagagcatcgaacgcttcttcccgcagcacgcctggctgaaggccgagggcacctgagtctggcattcgcgcatcttgctgcattgcattcctggcgcagaacggaatactccccgccaacacaagttgatcgggagtcgcgccatgaacaatctctccagtctggtccacctgcatttcgacaaatccgccaacgaactcggcgacatcgaaaagcgcgtgctggcgaaggcgcatgcgcgcaaggtcatttcgacggatatcaacgccgcccttagcgccgaatcctcattcggcgagcggatggcggacaacatcgcccgcatcggcggctcctgggccttcatcaccaccttcctggtctttctggccgtctggtgcgtggtcaacaccatcattctcgccaccggtgccttcgacccctaccccttcatcttcctcaatctcgtcctctccatggtcgccgccatccaggcgccgatcatcatgatgtcgcagaacaggcaggccgagcgcgaccgcttcgaggccgccaaggactacgaggtcaacctgaaggccgagctggaagtgctgtcgctgcatcagaagatcgacatgcaggtgatgaccgaaatcgccgccctgcgcgaggatatcgccaagctcacccgcaagctcggcgattgacatccgggtgagcgaaaatttagccggccacaggcacggcgcgtcatttccgtacactccgatatctcgcgggtacacgcatgtggtttattaggtaagtaaaaattaagacggacaaatgtatccttcggttgtcttcgctgcggcgaggatcatcgcaaggagtgcagtgcatgaggaatgcccgacgtcttctcgccaatcggcagggcgctgccgcgatcgagttcgccatcgttgccccggtcttcctgctcgttcttctcaccctgatcgcctacggcatctacctgagcgccgcccatgcgctgcagcagctgacggcggacgcggcgcgcacggcggtggccggcctgtcggagcaggaacgcgcccagctcgtcaataattacatcgcgctgtcgaccctcaacgatcccctgatcgatcgcaagaagcttcaggtcaccgtcgccaccgaccccacgaacgccaaccagttcacggtcacgacggagtatgatgccagcgcgctaccgatctggaatctctatacatttccacttcccgacacgaagatccgccgcttcgccaccatccgcatggggggtatatgaaagcaggcgtaaggcgatatctggcgggcctctgcgcccgccgggatggcaatatcgcgatcatggccgcgctcagcgcgcctttgatcatctcgacgctggcgctcggcatagatttcggcgcgatgacgctgcaacagcgccgcctgcagcaattgagcgacatcggcgccatcgtcgcggcctccgacatcaacaacgccgccggcaatctggtgacaaacttccagcaaaacggcctgaacgtcgccgtaaagtcaggcgtcgcttacgcaacatcatccggaacgaaactgttgaacgccgcccagctcggcactttcgatgccgtcgtccagtacacgccagggatttatctcgccgatcccaacgtgccgctggaacagcgcttcgtggccggcacccagccctacgatgccgtcaaggttgcgatccagcagaaggcgcagttgaccttcgccgccgccatcatcccgcccccgacgctgagcgccacgggaacggcatccgcctccaagctcgccgccttctcggtcggctcgcgccacgcaagccttaacggcggcctgctcaacgccgttctcggtggcttgctcggcacgacggtgtcgctgaaggcggtggattacgacgcgctcgcctccgccaacatcgacctcctgtcctatctcgatcttctcgcgacaaggctcaatctcaccgccggcacctatgaggaactgctggcgaccgacatctcctatccgcgcctgctcgacacgctggccgccacgcaagggctgacgccatcggtcaacaaggcgatcacctcgctgtcgaaggggctcggcaccacgcagatcaaggtcaagctgcagaacctcatcagcctcggttccgtcggcgagcggatgatcggctccggatcgcacctgctgctcgaagccagcgcgctcgacatcatctcggcaagcgccttcgccgccaaccagggaaagcaggtcggggtcaatctcgccggtaccgttccggggctgaccagcgtcacgctgaagatcgcgatcggcgaacgccccaaggggatcgcctcgaatgccatcggcacgacgggatcggccgtcaggacggcgcagatccgcattgccatcgaagccggcgtgaccgggctcagcgccatcgccggcatcaagttgcgcgtgccgctctatgtcgaggccgcttacgcggaagccaagctcgcgaacttcgcctgcctcggcggcggtccgaaaagcgccagcatcggcgtcgacgtcgtgcctggcgtcgccgaaatcgcgctcggcgacgtcgacccgaccgccatggccaatttcggaaccaagccgcgcgtcacatcagccaccatcatcgacgcgctgctcctcaaggtgaacgcgctcgccgacatcaacctgaccaataccagcaagacacgcctgacattccagccgaacgacatcaccaacaagacgatcaagaacgtctcgaccagggatacgctcacctccgccgtgcagtcgctgatcgcgggcaccgatatccagatccagctgctggtgctgacgctcgggaccaacaaggcggtgatgcaggcaatcgccgatacgctgtcgagcgtcaccgctccgctcgacgaggtgctctacaacacgctgctgatgctcggcatcaagatcggcgaggccgatgtgcgcttcaccgatgcgcggtgccagcaatccgtgctggtgcaatgaaaaagcccggcgcgatggccgggctcattcaaacagtctaagcaggcgatcagcctcagccgttgacggccatccgcttctcatcacggccgctcttcatccgctcggagagcaggaaggcgagttcgagcgcctggtcggcattgagacgcgggtcgcaatgcgtgtggtagcggtcgtgcaggtcttccgccgtcacggcgcgcgcgccgccggtgcattcggtcacgtccttgccggtcatctcgatgtggatgccgccgggatgcgagccctccgcgcggtggatctggaagaagctttcgacttccgacaggatccgctcgaatgggcgggtcttgtagtggttgagcgtgatcgtgttgccatgcatcggatcgcaggaccagacgaccttgcggccttccttctcgacggcgcggatcaggcgcggcagatgctcggcgaccttgtcgtggccgaagcggcagatcagcgtcagacggccggcctcgttctgcgggttcaggacgtcgatcaggttcaacagatcgtccgcctgcagcgtcgggccgcacttcaggccgatcgggttcttgatcccgcggcagtattccacatgcgcgtgatcgagctggcgcgtacggtcgccgatccagatcatgtggccagacgtggcgtaccagtcgcccgaggtcgaatcgacgcgcgtcagcgcttcttcatagccaagcagcagcgcttcgtggctggtgaagaaatcggtctcgcgcaggctcggctggttctcggcggtgatgccgatcgccttcatgaaatccatcgtctcgctgatgcgatccgccagcttgcgatagcgctcgccctgcgggctgtccttgatgaagccgagcatccactgatgcacgttctcgaggttggcatagccacccatcgcgaaggcgcgcagaaggttcagcgtcgcggccgactggcggtacgccatggcctggcgttccggattcggaatgcgcgcttcctcggtgaactcgatgccgttgatgatgtcgccacggtagctcggcagcgacacgccatcgagcgtttcgatgcccgacgagcgcggcttggcgaactgaccggcgatacggccgaccttgacgaccggaagctgcgcgccataggtcaggacgacggccatctgcaggaacgcgcggaagaagtcgcggatattgtccgcgccgtgttccgcgaagctttcggcgcaatcgccaccctgcaagaggaagccgttaccttcggccacattggcaagatgctttttgagacgacgcgcctcgcctgcgaaaacgagcggaggatacgacgccagctgggcttccgtcgccgcaactgctgcctgatccggatagtccggaacctgctggatcggtttttgccgccaactgttcggagtccaattctgtgccatctcgttcacctgtttcagtatccggtaccggccggatatcccgtctttgaaatatgggcggcttatagccgtttagcgtcatcttgcatagcggggttcggcgcgcttttgtccgcctcgccgcgccattagatgacgccctataaaggtattcgcggccgcgttttcaaatgcccggcacgaccttaacgttcgatataccaagacgctttgtatctaatttatgctttgacgttaaggatcacgctgttttcagacagccgagcatgacgctcccgcttttcaatcatgacttttcccctcctcggatatttccaatgcgtatgtttgatcgcctgctggcggatcgttcgggcaatttcggcctgatcaccgccatcctcatggtgcccctgatcggcgcggccggcctgtcgatcgacttctcgcaggcgctcaccatgcgcacacagcttcagggcgcggccgatgccgccgccgtcggcgccgtcgcgcaaatgtcgccggccatgaagaaagcgcagacgatgaccggcgacggtacgatcgcgatcggcaagaccgacgctcaggaactcttccgctcgcaactgtcgggcgaagccaccagctttccgatcgacgtcagcgtcgatgtcgtaaagaccggcagcgtgctgacgtcatccgtcaccttccagacacgggtgccgacctccttcatgcagatcctcggccagaccagcatgccgatctcgggcacggccaccgctcgctacgaaacgccgtcctacatggatttctacatgctgctcgacaacacgccctccatgggcgtcggcgcgacgcagaccgacatcgacaagatgctcaaggccacgaagaatggctccgacggcacctgcgcattcgcctgtcacattgtgtcgacatccggtgtcgaggacaagaacagctactacaacatcgcccgcaataacaagataacgatccgcatcgacgtggtcgcccaggccgtcaaggcgctgatggcgaaggcaaccgacacgcagacgatgaacaaccagttccgcgtcgcggcctacacgttcggcaagaccgcgcaggacgccaagctgttcaaggtcgccgagatcaacaccgacctcggcaaggtcgcgacggcgaccaatgcgatccagctgatgagcatcccctatcagaactacgacgacgaccagcaaacgagcttcgacaacgcgctcgccggcatcaaggacgagatcaagggcaccatcggcaagggcacgagcgacgccgaccgtcagaagatcgtattcttcgtggccgacggcgttgccgacagccgcaagccgtcaggttgcaccagcccgaaaggcgccaatggcaaccgctgcatcgagcccatcgacgtcaagagctgcaaggcgctcaaggacaagggcatcaagatcgccgtcctctacacgcgctatctgccgcttccggaaaaccccttctacaacgactgggtgaaacccttcgaaggcaagatctcgacgaagatggaggaatgcgccagccccggtctctatttcgccgtcagccccaccgaaggcatcgccgaagccatgcaggcgctgttcatgaagatcgtcagcacgccccgcatcaccagctgataggtttaccagctgacgcgcgtcagacccgcacgccgtccttgagccggtagctcggcgcatacatggtgacgagctcctcggcggcggtcgggtgaagggccatggtccggtcgaaatcgtccttggtgcagccggccttcagcgtgatgccgaggagctgcgccatttcgccggcatcgtggccgagaatgtgggcgccaacgaccttgcggctcgccgcatcgacgatcagcttcatgatcatcttctcggcacgccccgacagcgtcgccttcatcggccggaactgcgcgcgatagacctcgacgtcgctgtagcgcttgccggcctcttcctcgctcagccccaccgtgccgatctcgggctgcgagaagaccgcggtcgcgatcgtctcgtgatccggcttcgtcgcgttgttcttgtattccgtctcgatgaagcacatcgcctcgtggatcgccaccggcgtcaactgtacccggtcggtgacatcgcccagcgcgtagatgttgtcgacgctggtgcgcgaataggcgtcgacgacgatggcgccctgcgcgttcgtttcgacgccggccgcctcgagcccgagccccagcgagttcggcacgcggccgatggcgagcatcaccacgtcggcgtcgatcgttccgttgttgagcgtctcgacgatcagcccgtccttgcccttcgccacgctcttcagcatgtcgtggcactggatcttgatccccttggcgaccatcgcctcgtgcaggccgtgccgcaggtcctggtcgaagcgcgacaggatttccgctccgcgatagacgagcgtcgtctcgacgccgagcccatggaagatattggcgaattcgacggcgatataaccgccgccgacaatgacgatcgagcgcggcaattcctccagatgaaacgcttcgttggaggtgatgcagagattgtgaccgggcagcgcggggtgcaggttcggcgtacccccggtcgcgatcacgatcgtcttcgccgtcaccgtcttgccgctactgacgagccgcacggtatgtcggtcgacgagttccgcgcgcgtctcgaggatctccgcgttggcgcccgacaggcccttcttgtagagcccttcgagccgggcgatttccgcgtcctttgcggcgatgagcttcttccagtcgaacgtgctttcgccgacggtccagccgaatccggccgcgtcctcgaaatgctcgcgatattgcgaggcgtagacgaagagcttcttcggcacgcatccgcgaatgacgcaggtgccgccgtatcgatattcctcggcgatcgccaccttctttccaagcgccgcggccacccgcgcgctgcgcacgccgcccgagccgccaccgatgacaaagaggtcgtaatcataggctgtcatggggatctccggcaggaatcgtcaggaaggaactttgatatagtaccgatatcgccaaaaacaaaagccccggcgaaccggggct

SEQ ID NO: 34 - DNA, 50788 bp, Rhizobium matallidurans
  source 1..50788: mol_type = genomic DNA
atagtgtgatcgctcagggcctaggctcaggcgtcgactctccacactgtctcttgtcaactgtggccagtgtgcccaagctatgaggagaactgccatgaagtatcatgccggactggatgtcagccagcaaacgacatcaatctggatcgctgatgacgaaggcaggattgtggccgagcggaaagtagcgtcgtgcccagacgcgattggaagcgtttgaaccgttctcggtaagaggcggtcaaagtgccgacctcgaagagaaccatgagcctgacccgcgatgccagctgcgaccagcttgacaaccgcgatcagagaacgctcggggacacggtcgcgaactcatgcgaggcgtcttgaaggggaggcacaatcttctaatgattggccgatatgcttcactacagccacgaagcatagatcctagtcggctcttcagcatatccaactgctctccaccggcttcctgaagacatgggcgccagtgtgttggtcaggtccaaccgggccgcctcgtgcattggcttttcgccacgcggcgccgcgagaccccataaatgcgcgcttcgagcggcccgagatggaccgctcgacgttgcctcaccgcgatggatcaaccgcgacgataccgcaaacgctccgcttcaatctgttccgccgaatagggctcagcgttctcgtcgaagcggttccaaccctgttccacatagctggctcgccgcgattgataatcaaccggacgggactgcgaaaggatggactgagcggttgcgaccttgctctcttcgaccctcgcggtaactaccgaaccccctcggcgaattccctcggcgtaaaaattcgcttcgtcttcggaaacgccttcccgaaccatggcgccgacgatgccgccaaccgcgccccctgcaacagcgcccgcgacagcgccagctgccgtggccgccagccatcccgcggcgacgaccggaccaacacctggaatggccaacattccaagtcccgtcagaagaccgcccgcgccgccggcaaccgcgccgacacccgcgccggttccagccccttcagccgcatgggatccctgtccctcgacatcgacgccgtttgccttgttcgtgacgatactgatgtcgtcggacggcacgccagcgtcttcaagcgccttcacagcggaacgggcgtcgtcgtagctgtcatatagtccagtaactgttcgcatgtttttgtctcctcttcttttgtttacttggccaacgtcacgttgccctgaaagtccagggaaaccttgacgtccgccccgtccttcttcgcgttggcgcgccaaacgccttggtcgtcaagctttaggctcatgacgtcagtgtagccggcaccttcgatgcgcgacttcgcctgatcctcggtgaagctattcttgccggcgaccggggcggcgggattgtgttccgtgttaacggccggcgtcgtctgcgaggtggacggggtctcgctctgcgcgaacgcggcggttgccgaaaggattatggcggcggaaagcgttgtgatctttttcattggtgtctcctcgagttacgaggacgaaacctcgaaaaagactgtttgttccgaggcttatgacaaattgtttgattaaggttattcggtcccaatcgcgcagtcactgcgtgacaatccatactgtcccgtctcgccgagtagaccgcaacgatgatggccatcccggtaaagccgatgagcccacgatcctgataatcacgagagtggatgtaaatgtcgattacgcgatgaaattctcatccccatggccttgacgagatcatccacggaacacgtcgagatgccctgaatgcaagcttcctggataacagctgtcagcgccttctcggccatgcggcgtggctcgaggaaggttgggaagtaagaccctttacgcagctttgggatacgcagctctcactggctttgatccagggcatgcggtgatggctgacgcgcgtttggatctgatttttgtgtggggagacgtgtccccacggtgaccgcgatcacgacaacctcctgatggaaagggatgggctaccggaaccgaccagagctcagtcgttggaagaattcgcctaactcgtttggaaaacgtttccgagctgtctcgaatcacgcgtgcgccgtgaagatctagacccacctcaagaccggatcgcccctacgcggactcaccagccggtcgcggtgtattttcctgacctctcgaaaagcgaccgaagtcttttggtccatctgaaacttcgaagccgcatctgctccacgccacgcgtttcttcccacgagccaaacatattttcgagacttgcggggtctcgcgtgggccttgccaagcgttatcacggcgttgtggcgcactttaaccgacggcagtggaagtcgtcaccttgtccaaagcttatccgtttgaattgcgatgttgtgtcccgccgtcagactcatgtccagatgacctcacgcggcgccccacggtgacccggcgccgacagaacgcgatcgcgttcgagccgccccggacagaccccgttaggagcgaggcgacggcaacgctgcatggcccaggaaactttaatgggccgccgcgtcgccgcgcgcttttggggcttggtttgagagcaaccgtgatttcctcaacgccggaagattcgtccgatcgcgatcaggatgcaggcgccgacgaaacccgcaatgaggtatccaatccaacctccaagcacgacaccgaaaacggaaaggatagcgttcgcgacgattgcgcccacgatgcctagtatgatgttcatgatcacgcccatgttggacctcatgaactgctcggcgagccaacccgcgattccaccaatgattattgccgctaaccagccaatgcctgcctgttccatgttgcttgctccatcgaagccgttggtcgtcagcttcagttagggctcgtcgcgaagccgtcaatccgaccagttcgtgaagctccgcggatgagcagccctcggcagattatccccttcagtccagctggcgaatatcccgacacagggaacctattcaatcgccttttgttcggtacgaaggcgtcctttgctacccggatgtctgcccgatatccttcggtcgggtgaagccctcgcgaaattcgcgggggcttcgtagcgtgattggaaagaaccgcgctatctaagacgggtggataatatgactatcgttgggaacccagtggcgttttccacattggactggggtctcatgacttgcgacgggataaatggccgcggaaaatcgcgacatcaactgcccgctgggctgttcgccgtcaaatcgacctctcttatccctgccgagcgtgagatcgcgatcgacaccatggctgagtggttggcgctagcacggggatcggcgccgaaacgctcgattacacggacgagaatctccatgagcgtatgctcgacctgccggacggtaggggtggatgcggtgatcgaggctgttggcatggaaagccatggggcggggagattgatggaaaaaatgcaatcgaagctccagcatcgagcctccttacgccttgtggcaagcggtccttgcatgtcgtccaggcggcatcgtcttattgcctggcatgttcgttgggtcggccatcgcggcgccctttggtgcattcgtcggcaaagccatcacgttaaagagggcgcggacccatgttcagagatgcccgcgcccgctgatggagcggatcgtcgaagggaggaacgatccatcttccctcaccacgcataggaccaggctagaaggagggccagaggcctaaaagattccgcgacaagaaggacggctgcgtgaaggttgtcattcgaccaaacgcatagttccctggggctctccggtaaagcggaggctccaacgggcaaggttactcggcagcaaccctgagttccgccgcgacggcgtcaagcaaatcgatcggcgcgattatatcgaagtcctcgatcatgtggtgctggtcggaaccggtcaccgctagcgtccaatagtctgggtcctcgccaaagatcgtggacacttgaacgactgttgcacttccctttgcatgctttcgcggtcgcgcccaataaaacgcatctggcaccaatctcgtcatcacgctcactccccacgggtgcgccgacgataccagaattttcttgaaacgccatggttggcatttgtcgggtaccgtaccatcgccctgccggccggtcgccaggaagttggaccgcagcacgcagcaaggcgatggcatgatgatcgaaactagtcggtgatgcgaattcttgtcgccaccatgaaacgctcctttccagcgttagtgcaatgaaccgccagcacggtcccatctttcccgacgacggttcgtggatagccgacgtccggcagtggcgcgggtgggccgacgacttcctcgtcggaccacgatttgccgtgtcggtgctgattttcattcagatgccatacggcgcgatacccgatccgtaaaccaacgccactcgtgcgccgggcagcagggataagctaccgggattgccgccgaagccagtattctccaccggtagacccagtgggcgccatgatttccccagatcttccgacgaatgcttccagccagccatcctgcccggcccgcgacctcgtcgaatgacagtcagcacggtatcatcgtccaatcgcacgcttgatggcattatgctgtaactttcgtcgtcgtagggaagccgacacttggcctggaacgacctgccaccgttcaagctctcggcgcacagcgttcttccctcctgaccgtcaggcttcgcgcaggtcaccatgaacaatgcatgttgcgatgatatgggaaggatgtcggttctggtggcggcgccgccgatatcatgcccgctgaacccaaaaggtccgtcccagtgcgcgcctcggtcccggctgaggtagaaccagctcctagcattgatcccaaggtctgttcgagccgccagcaaatgcactccgggtcaagaaaatcacttggcgcggtgacgcgatcgaagtgtccatcatgaagcctcggcccggaccgaaggcgtcttgcaacgtgctcatccgcggaaagactttcaccgcccggcgcgtgcccgtggaattcctccaccatccacgattttccccccatccttgctacgggcctgcctaggcacgaagttgtggcttttatcgcgtgcgtggagctcaccctgatcctccaaccaacacggcgagaacctcttcctcccagcgccagagcccataatcggctggccaggcggcgaagtgatgcttctcgcggtagacaacggaatgttcggccaaaatccgtcatctatcccccgcgatcgcgtacaagaccgaggagtttgaacgccgagaccccattatggtgaggacgtaaattttcgctgatatctcttttgtctcgcggctgcgaataatcttggcggcttggggaatgaagctagcgaccgagcacatggacgcgccgcaaccgatcattgtcgccatatccatcacgacttgctccagtgcggttacattgccgtcggcttcgtggcgtccacgcctcgtttgcgatcgatccatcccatgacgggagtgaccgcgatcccgtgcagaaagatcgatgccaagattatgacaaagaccgtcgcccaaacggtttccatgccggtgaagtcagccttgcccgaggcgtaggcaaggtaatagatcgatcccagaccccggatcccgaagaccgacacgattagcttttcggctgttgggtggccgcatccagcaaggcttaaccagccggcgagaggccgaacgaagacaagtgtcgctgccccgacgatggcgacccgccaatcgactagatccagcagcgatccttccgcgacgatagatccgaagcagacgagcaggaccatcatcaagagccgctcgatctgttccccgaaatcgtgcagttcactgtggaagcggctcttgcgctcgacgtgacgaatggtcagcgcggtcacgaataccgcgacgaacccgtatccgtgcaggagttccgtcgcgccgtaggacagaaacgtgaaacctagcgcggccaagccatccccggttttttcgatccgtctggtctcgggcagtttaaaggtcaaataaccgagcaatcgaccgatgagccatccgaccccaattccggccgcgagcttccagacgacatcgaaggccaaccagtaaccgatccactcctgtccgttgcttgtcgccatggcgatcgcggccatgacgaaggggaagcttagcccgtcattcagccctgcttccgacgttagggagaaccgaatatcgtcttcctcgccggtttgcggcggtccaacttgtacatcggcggcaaggaccggatcggtgggcgcgagtgccgcgccaagcagaagcgccgaggcgggtggcaagctgagtagccaccacccaagaagagcgatgccggcgatcgaaagaggcatggcgatgccgagcagacgccaggtgatcatccaacgtttccatcctagcgctcggtcaatcttcaggcccgcgcccatcaaagccacgatgaccaccagttccgtgagatgctcggcccagctggtgttttccaggggattgaagcgtggaaggggcgtgaatggcgaccaggtcagcaacatgccgatgacaatgcaacagatgggcagagatatcggcatgcgtttcaaggccagcggcagccacgtcgtcagaagcacgatcaacccgaatatgaaaagtgtaatgacgtagctgttcaatcggctatttctcccgcgtcggcttaagcccgttccagcggcaatctggcgacctccgcgccacgaccttcacgcttgcttgaaagtcctcggccatgtcatgagaaacttgattggtggcgcggggctcccggtaaccgacatggcggtccacctcggcgggtctgtccgccggtatacagcatggatttgagccaattcgcctccgaacgtcgcacgttctcggcgcgttcggtgtcaccatgaataatgaccgataacagaccgcgtccaagacgacttgtgtcgagtactgcggcccgacacctcgggtcctgttccaggaccgctctcgcgctctttgccctcttgaagcttttcgatgacccacccgggcaagtttgctcgcttcccgagccattctcttcgcggtgagtccgggtctggccaatggtgtggtgaaccgcgatctgatccgtggccagaccgtatttccgcccccgaactccaccctgattttcgggtcaggggagccctccctgagtgcttgcgcgcgtcgcgagcggcatcggcaattttcgcgagctcctcgtacacgcaatcacaggcggtgtcttgaaagtcgtgtggcgcgaatatgccgtcagacaaaccaaacgttgtcatcgcgatcctccagccggcctgtttaattaggcaagccttacacataatcaggtgcccggccaacgaaatatactttccagggttggtgtttgacacatatcgggtcggtccttttattagctccacgacgtttgttgggcgttcgccatggaggcatgcgacagtttttcggaactcgtcgccgagacagttggtcccgcggcaacccttggcgatgcgatggacctcgtggagcgtggcccgccgatcgatggagcgatcctggatatcaagggaagtctgaggcttggactgccttcaggtgcagttggatcctcaaagctggggcgggacatcggtttgctcctgtctcgaagcaagttaacgttgggcaatgtcaccagttccaaagccggatcgtcgatttgggccggtcttggccgctacgtaccgaacctcgttttgcgagcggttacggaaggccataatcatagaccttcctattggtcgaacctagccgaaagccgctgtctgagatagatattcacaagatgggcggactgaaacgagcaatgcgatcaaaaacgggcaaggcgtggctaaccaagctgcttgccggtgccggtgggctgttggcggcttcgatttcacttgggtacacgctgtatgagcgcaggcaggccgatgtcgtccctcaggtcgaagttgcgacaccggtggatgctgggcgttggaaggtgtctttcgccggaagcgctttggccaaagagatgccgaatggagcgaagatatcgccgggcaagaaggccatcgttgtcagcatgatgctagaaaacctgtcggcacagagctccaatctctatggaagcttgatcaagcccaccaatctgcccgacacgccgaagccgcaatattacctgagccgcgaccgggccatcctttgggatctgcagcctcgaatgcccgaggcggtaactgcggtatgggaggttcccgcgaatgtcgcattgcctgatgttctaaggctgcgggtcgagggcgagttcttcaagccgagggacaatctctataacgcgccgggctggttccccttggggacggtcgcggaaatcgcattgccgctggatggcgagacgtcggagacaaaaccttgaggcgtgcggcaccaatgattccggctgttcttggagcagcggctctgcttgcggcactccaggcaacgacgccaccctatgccacattgaccgggccaatcagcaccgtgggtcgtcagagcgacacggtttcgagtgatacgttcagtgtaaagatcaaccgcgtcctgaaggcgaagagcattgcctacaagcaatttggacgagcggtggatctccagagttccggcgtctgggtggcggtctccgccgagttgcaggcgttccagaaaaccgtgccggttcgcgccgcgacgctgatcggttcatccggtcgaatgtaccgtcaatcgcgacgggcaggggatgcgccaaacgttctctcgacgaaaaccgttcaacccggattgccgacgacgggcctgttggtgttcgagcttcctgaggacgagctccgcaacatgaagcttgtgctttccgaacagtatgatccgcagctgaaggatgagattagcgtgtcgctggagacgatcgagaccgcaccgcaggctaggctggagattcgcaaagatggcgtttgaccgcgagagaaggacttggttgctgtcgctcgcaagcttgccgcttctcgtagtcgcagctgttgtcgtcaatgcatggcgcaacatcgaggattaccggcatcggatcgagacggatatccagcagggatccggccagctcgactacgccggcgcggcgtggcgcctcgagaaggtgagacttattggtgatgggcgcgacgcgcaactgcgtcttcccggcgagatgcggctgatcatcgttcgcatggtcgcaaccgccgcccgcgatatcggtgacggctggggccaatgcgaggtcagcctggtggatgggacggggcgccgctggttgccgctcgacgtcattctatcgagcgacatcagccgcgatctggagcctgacaacgagcccctaaaaggctgcggtatcacgtcgctcgatccgcctcatcaagaccatgccgccttgatcgaagaaaagttcgtcgttcctgacgcggcaatccccacgctgtctgtaaggttgagcgtcgcggccttgcggccgcgggcgatcggcttcccgctcgcgttgaactgacaatcacgcctcaccgaggcgcaattctcgccccctccatactcgaccctgggcaaagccgatctccagcgttgccgccagcaggcaaatcttgatcggtgtgatcagcaggccctcgcccggatcacttggcgtgccgacgaagggtgaaatcgtctgcgcgatgacctgccacagcggcaagtcatgcggtccgatgagctgtgtcagccaataccagctccaggcggagccccaatccaacagccgatagccgataatggcgacgaggatcgaaccaataccggaattcagcgccaagcctatcccttcggcaagcgcgcgatagcgtttcaccgtgcctgcaatgaagtgcgaaatgaaatcgcgcaccgacttcggcagtgcttcccaacgggacacggcgcgggcgaggcgcccttcgccgggcatacgcacgctatcgatgtcatagccgtacacgacggcagcgagcgtgagccagacgaccgggtaaagcgcatagaagaataggctgacgagctgcgctgtgatcggcggtgacgcgaattcgggtggaatcggcacatcccgttgcgcaatggcgtctgttacgggcgaaagcaggctgaccagtgtgccgatcgattccgggatatggctgaaccaggccctgatctcatcctgccactccgacaggacgaacagaccgataaacgcccagttggcttcgcagaccacgatgaggatcggccagatcggcgcctgcgaacgcttgtgcatggtttttgcgaaccgtctcaccacccaggcgacaatgacagggatgatcagccacttgccgcgggaaacatccagcaaaccggcgctttcgccggccaagaaaaggctgagcgacagtttggaatagtcccgcaccgtgtcggcgagaaaaccccaggcggtgtagaaggcgaagaaggggacaaggctgagcgccagagcactgacgaaatcgccggggggcgggggcgtctcaacctcggtcgtcgtttcgagtcgatccgtcaatccatgtgaggcggcattcagcgccggaaggccgcgccgcaccgtctcaaacagggccatgatgacgacaagtttcaacagcacgaccaaggcgagaacggaaagaccagcgagcgagctccagcgcccgatcatggcagcgaattcgttcagtagaagattgccgatgaaaccgagcagccagagggctgccaattgcggccagaaacgccagacgagagaggcggtcaatcgcagttgatgcaatgcggtcttgaagccgccgtctaaggtagtcgcctgagcggagtaggacatttctccctgataccattgctaggattcatggccaagattggatttgtcgatcccagcctctgggggccgcacttccagcaaggtcggccagccaatgatgaccggctctcgaccgatcagcggcctgaagacttcagcctcgggctcgtcagccgctatcgcgatgatcaccgaggtatcgacggcgatcatattggtagaccgttctcgtcatagaattcgtcgtgcgccgacgtcgtgccggccgggatgttgcgccgatctttggctgccagatcccaaacggcgtccattggatagcggatcttgtcttcgcgcagcgcctggtcgtaacgctcgagcgccagctccaccagccggttgatcggctgcccggtgcggctggaaagggcatgggccagatcgcgggccttgctgctgcgaacggaaagctgcggttcagacatgcggcggacctgattttttatgcggcgaatatcggggaagcaacgcgagatggcaacgttttcggtttggatggctaacttacgataagaggtacctatcggatattgaggcaaatcctttgatcgcgtcatcatccggctaatctttgggaaggcgccgcgaagcgttgtgatacgccagcatgatcggatgcaacggcaatggcggcattaattgacctcgaggcgattgcaccggctcaatgaatggcgacgctatcaatacggagagataccgcccgttagacgaccgacgagaagccgttcatcggagttggggcgccgagcgcttcagcggtcacatggaccgcttgggttgcatctagcgccaccgccgctagttcttatgtgagtggaatcgcggaaggtgaccatgtcaaggattgccgttgtcggaatgggagcaatgggaagtgccattgcaaaggcgctcccgtcatcgagcgcggagattgtcacctatctggagggacgatcatctacgacacgtgaacgcgtggccgctgcgagcatacgggaagttgagctgacggcgttggttgacgcggacgtcatcttgtcggttctgccgccttcccaggctctagcggtcgctgaccttgtcgcacccgctatgcgctctttcaagtcttcttccgcggtctttgtcgactgcaatgccatttcaactgagacgatgggcaaggtcgctcaggtgttacacaacgccgatgccaaggtgcttgacggctgcatcatcggcgggccgtcggaggtggcaaagccaggtccacgcttctatcttagcgggggcgcgcgagacacaattcctgttcttgtcgaatacggcttggatgcacgtgccctggaccgagacgttggtgccgcgtccgcccttgaaatgtgctacgcggccatcaacaagggcctcatcggtcttggcgcctcgatgctcttggccgccgcgcggagcggtgcgaagcaagctctaatggcagagctttctgaaaatcagtctcggctcgtggcgaagctcgccaaggacattcccgacatgtacccgaaagaataccgttgggtcgaggacatggatgagattgccgcgtttctgggagcagatgacccggccgcggatatattctctgggatggcggctgtcttccaacgactggcaaacgaccgcaagggcaacggcgagatagcgacgaccttgtccgagatgctggcggatcgaccagaaggtagcctcaatcggtacgatgccttgagcaaccgtaattttgacgaaggcagcaagtgcctcgaaccggtcccaagcgctcgtgaaagccaggatagagctgaactggaagaggggcttgaggccagctttccggctggtgacccgatctcagctaccgtgaccagcgaagcgggaagcacgaggacgtgaaagcttccgatgaccttaggaaatgaggcacaaatggctgtcgtccgcgtcgtcgatcttgaaacaggaggtagtggccagcaggaggtgtgcgagatcggttggcaggacgtcgtccaaagccgggatggtcggtggcagctcgatgtcgagcgtggctcattgatggtcaatccggggcgagctatctcggcggaaacgatggccgttcatcacatcctcgaccgtgacgtcgccggagcaccattgtggagggaagtcgcatcgtcggtgctgcaaccgcgtcggcgtcctttagcacttgccgctcaccgcgccgcgttcgaacaacgctattgcactccacgtctgagcggaggtgcgcaatggatttgcacatggaagtgcgcgttgagactgtggccagacctaccgcgcttttcaaaccagatgcttcgctacctgcgaatgcccgacgggctggttcacgagctaggcctcccggcccacagggctttgcccgacgcatacgtgaccgcccaccatctccgtgacatgctcaatgaagcttcgctaggtcagttgcttgcttggagtgccgagccgggtcttctaccccgcattccatccggaacggaacggggaaagacttgggatgaagtcgacatggaggtcgtgcggcatttcctttccgaccgagatcgagatgtacgcttcaccgcccagacggagatcacgagacggggcggcgagcctgctcgggaacgtgtccccgctcaaggccggctcctctagcgggtgcgggcacgaacgacaagaaaaaaactagcgaggagggccgatgttagtcgacccccctctgtggccgacgtccgcaacaggctaacggacgtggggctcggcgatctatcaatcttcgcgacggcgaaaggttgcggaaatgcatgtactcacttcggcgtaatgccaccccgggcgaccgctgggcgacggtgcgtcgagcgcccgtaactatcgcggccaccggcggggaagatgggacctaagggaccaagaccaactcggcacggacgacgaagcgaacggcgggcaaggcacaaggccgacgttaagcgcggccgggcaaccggcgtccgacccacgtggtgatgaccctcgcggccccttgatcgcctcggcgtcaacgctcgcgcatggtccttgtgaccttcgatgggcttccttagatgcggggcgcgcggatcggccatgttgataggccgtcatgccaccgttgcggcacacgatcagccggaacgtcgccgataaagtcagtctgtcctggaaccgtggacgcgtttccgcatttggattaatgaccgatccgcgagaaaaaccatggccgacaacctctccaaataccgcgcgaaacgcgatttcaaaaagaccgccgagccaagcggagaggttcaggtaaagccctcgaaccgccgacgcttcatcatccaaaagcacgacgccactcgccttcactacgacctgcggctggaattggacggtgtcttcaaatcctgggcggtcacgaaaggaccatcgctcgatccgcaggacaaacgtctggcggtggaagtcgaggatcacccgctcgattacggcgattttgaaggtacgatccccaagggccagtatggcgggggcacggtcatgctttgggatcggggttactgggagccagagggaaacaagacgccagagcaggcgctcgccaagggcgatttcaagttcacccttgaaggcgaacggcttcacgggagcttcgtccttgtgcgaatgcgtggacgagagggcgagaagcgaacaaattggcttctgatcaaacaccacgatgatttctctgtcgacgaaggcggcgcgagggtgctcgaagagaatgaaacatctgtcgcctccggacggaccatggatgccatcgcatctggtaaaggccgaaagccaaagccgttcatgacatcgggcggtgccgttgaagcagacgcggtctgggacagcaacgaagggcttgccgccgacgaacgaaagggaggcagcaaggagaagccgaaatccgcgacaaaggccgccgcggccgcgatgcctctcttcattgagccgcagctctgcgaaacattggaacgaccaccgtcggccaaaggctggattcacgagatcaagttcgacggctaccgcatacagatgcgaatccaaggtggtgaggtcaccctcaagacccgcaagggccttgattggaccaagaagtattctgctatcgcgagttctggcgaaagtctcccggacgcgatcatcgacggcgagatatgcgccctcgacgagaacggtgcaccggatttcgcgtcactgcaggcgtcgctgtccgagggcaagaccgatgagctcgtcttcttcgccttcgatcttatgttcgctggcgatgacgaccttcgtgagttgccgctcacgcaacgcaagaagcggttggcttcacttttatccgaggcgggcgacgacccgcgtatacggttcgtcgagcatttcgagaccggcggtgacgcggttttgaaatcggcctgcaagttgtcgctcgaaggcatcgtctcgaagcaggccgacgcgacttacgtgtcgggacgaacgaaaacatgggcaaaatcaaagtgccgagcgggccacgaggtggtgattggtgcctatgccaccagcaacggtaaatttcggtcgctcctggtcggtgtcaatcgcggtaaccacttcgtctatgttggccgcgttggaaccggttacggggcgagcgtcgtcgaaaaattgttgccgcgactgaaaaaggtagaggcaacgaaatctccgttcaccggcatcggcgctccgaggaaggcaccagatattgtttggctaaagcccgaactggttgctgaaatcgagttcgcggggtggacggcggatggccaggtccgacaagccgcgttcaagggtttacgtgaggacaagcccgccgatgaggttgaggcagagcggcccgcgagcccagacgaaacggatgttcccgaccccgaggccgcacccaaaccgccaaaggcgtcgaaatttcgcaagggggccagggtcgatgtcatgggcgtcctgatatccagccccgacaagccactgtggcccaatgccctggacaagcagcccgtcaccaaggttgatctggctcactactatgaggccgtgggaccatggctgatcggccacataagggggcggccttgttcgatcatccggacgccagacgggatcggcggtgagcagttctttcagaggcatgcgatgcagggaacatcaaacctgatcgagcaggttaaagtaacgggcgataaacagccgtacctgcggattgaccgcgtcgaggggttggtcgccatcgcccaaatcgggggcacggagctgcatccctggaattgcgaacccgagcagcccgaggttcccgggcgcctggtgttcgatctcgaccccggtccggacgttgatttcgacaccgtggtcgaaggtgcgcgcgagatacgagatcgactggaggagcttggccttgtcagtttctgcaagacaaccggcggtaagggtctccatgtcgtgacgccattgtcggtgccgaaaggtaggaagctgacgtgggacgagggaaaggccttcgcgcacgatgtctgtcaggaaatggcaagggacaacccggacctttacctgatcaaaatgacgaaaagtcttcggaatgggcgtatcttcttggattacttgcgcaacgaccgcacctcgaccgcggtcgcgccgctctcgccaagggcccgaccgggagcgacggtgtcgatgcctctcaattggacgcaggtcaaggcggggcttgatcccaagcggttcacgatcagaacggtgcccggcatcctgaagagcagcacggcctggcaggattattgcgacggccagcggtccttggaacaggccatcaagcgattgaagcagcgcaaaaggcgggatgactgagcgggtggtcgcccgccgggcgattggccgcttatcgaattcgaaaagcatggcttctctgaccacgggcaccataaatggatcttgcctggaagaagctttgatcggggacccagttatcccactgcacggggccggcgaactcgaaggctgtttcactctgctgcccctcaacagcggagaactgaaatgcccacgcgtccacgtcgtgggcttttttcctttttccagacggcaattgcgctaatagacaacccagccaccgccgctcaaacctccctggtagttcgagaccagacaccgtaggtgagctcctcgatctgtccagtcatcccggggtttaacagcgcgtccgctgggtggacgtaaaaggacgctccccgcctctctcttgtcggtgaagaggtcgttcgggccggtcccattgttcccaatcattaagttgcggtcgggaacgcgctgacgtcccaagagcgttgcgaccgtggtgaagcaacctagtaaccgccaaggccacgacagcgtgagaggctgatcttcgaaacgagatgaaaaatggatccgagccgcgcgcgcggcggtcgcacgtaagtggggcgacttgttaaccagccttgcgcgatttcagttccttttggaccgacttcttcagcgcatccattatgtctacaacgttgctctgcttaccgtcatgcagttccttcgatttggacgtcgctttccttacgggctcgtgagcttttttctttgaagcaataagcttcagcaagctctcctggatcggatcggacgtcattgctggcgaccatttttgggtccgcttcttgatgaacttttcgagcgcggcgacacccttggtgtccgaacccttgccgatggaagtgaaatactcgccttctggccgaacttcgtcaccaaacctgagagtccacacgacaatgccgttgtcgcgcggctcaaggatcacggcatgttctcgacgcccgagaaccacgcgagagaggccgacgacgtccttagccttcatggcctctcgaacgacggcgaacgcctcgtcgccgatcttctcgttcgccgtcagataaaacggagtgtcgagatagatccactcgatctcctctcgctgcacaaatctctcaatgtcgatggtgcggacgctttcgagctcaacggatcccagttcgtcatcggtgagaatgacgtaatcgtctttaccgcgctcatagcccttggcctcgtcctcatctttgaccggcttgcccgttacactatcgatataccgcgaaacaacccgattgccggtcttttcgttaagcgtatgaaaccgcactttctcgctttccgaggtcgctgggaccatcgccacggggcaggtgacgagagacagcttcaagtagcctttccagtatggacgacgaggagccatggtcagcttgctttcttgcgagtggtcttggacgacgccttggcatccgccttcggtttccttttcccagtattggcgttcgcggcgcttggcttcctggacgaagccctgttcactccagcgctttgcctcagtgccttcaaaagatcattgggtttggagaccttgaccgcccttggcttgggaagtgctttcccttccgctttcgccttcaccaaggcggcgagagcggtctcgtatctatcgtcagtcttggcggggtcgaattccccgatcttcgtgtcgatgatgtgcttggccaagtcgagcatttcgccctcgaccttgaccttcgcaacgtccttgaacgcttccttggaagaccgcacttcgtaatcgaaattgagtgtggttgcgatcaggccttcttcgtgtggcctgatcaaaacggttcgcattcgccggaacaaaacggtcctggcgattgctgtcacgttcgtcttggacagggcgtcgcggatacaggtgaatgcgtctcttgcttcatcgtcgactggcaccaggtagtacggtttgtcgaaatagacaccatcgacttccccgcaggagatgaaagcctctgcttcaagcatcttgtctgaatctgggatgacggccgcgacctcttcggggtcgatcatgatgtagtcgccgcttccggtctcgaaacccttcacctgttgttcccgctcgacaacctcttcggtctcgctatcgatgaattgccgcttcagccgatttccgttctcctggtttagtaaatggaagctgatacgatcggaagtcgaagcggcggtgtaaagacctacagcacaactaagttcgccaatctttaggtggcctttccattgagcgcggtgcgcggtcattccacgtctctcccatctgttcaagacaactaactaaatcgccttcaatatagttcccgcagccccgcgagtgcggcgagacagccggttcagacagtgattttgctcggaccaatacggtatctgtcgcgcaaagctcgtgcatggcttctttaagggtctcctgaggtcacggatcttgcctcgccccagctgcttcattttgaaaacattgggcgcttgtttcaacagtactcgtccaccaaccattctctaccactagtaacaaagtgtccgcagcattccctcgtaattcggtttgcctcgacacgattccacgaggggcgaggtcatcctcacttggtctttcgccggataaggcttggtaacgaccttgccttgatgagagcaaccaaaaaccggacaaaagatgatcgcaatggtcaggccacggatgagtttcatcgccggatctgcctttacgatttcgccgagacagagttcttggacagccaagtgatatatttttcttccacgaactgattgcgtggcattcatttgtccctccttagcagtgccgtctcaatatttgccgaagcgctccagccaatcttcaaataagtccgccggaagatctcattgatgaatttttccggatagagccttttataccgctccatcaccctataccgctccatcaccgcggcgatgatgttagccgcacggaagccccgacccgcaactgccgccgacagccccgaagctcactgcccggaatccttgttgaattgccgcgaactgaaatactgctctactgcctggtacacaaccaccgcagcgcatgatcccgcttagcggaaaatccgagtgctataaatgtggttcctccaagcgtacacagctgccccaaattttcaacccacactgatatgctaaagggtcaatggatcgggcgggccgacattgatgtagaacgataagaacgcgtggttgaaagcggatccgcgctcagcatggcatcttgcgtctcaccgaaattcggcaagaactctttcacgaacgtctgagccgccgcttgggtggcaacggctcgttttctcgcgcgacgcgcgtgccatcgactgtttcgatcttgtcattcggttcaatggctgtcggtgggtcggcgggggacgcccagcaaatatcgccgcggttcgcgacaatgggcggaatcgcaaaaaagagcggctagctagaaaaccgccacgaattcccagcgtaaaggtcgataatccatgagattggatccgcgagaggctttgtatggaatttgaagcattcggcacccggtcgcgccgcctcgacgttggaattattggcacggctatatcaagtccttccgcggcttggcttctcgcgaagcatcatgatgtaacggtattcgaggcacgggattggatcggcggtcactgtaacacgataacgtttaagtcagagagcggcgacactgctgtcgataccggcttcattgtctacaacgaagtgacttactccaatctgacagcattgttcgatgtccttagcgttccgacggctgcttccaatatgtctttcgcgccgtccctcaacggaggtcaatttgaatactccgcccgcagggaactgggcttattcgctcagtggtcaaccatcgccatccgccgctttttgttgatgatgcgcgatctcttgcgcttctatcgttacgcaccggcattatcccttagcgactgtccttctcgcaacggtctaatcccttctgattgggaggcatttgcatgatgatcacgctggcgatcgtccataaaggttgtgttgtctccggtctgatccacaaggacgtggactggacgcgcttaaactaagcctaaaatccatccatctgggagccccttatgaaaacttacctgaccgcctacatcgcgacgctgatcgccttcgtcgcgatcgattttgtctggctgagcaccatggccgaccgtctctataggccgacactaggcgaaatcttggcgccgcagtttcgacttgcgccggcattggcgttctacctgatctacgccgccgggctgaccttcctcgcggtcaggacggggttgatttcaagatcgatgacgacagccgtgctccacggcgctgtcatcggcctcacggcttatgccacctatgacctcaccaaccagtcgacgctgaaaaactggtcgcttcttctgacgatcgccgatcttatctggggaaccgtcttgtcagcggcagcatcgggcttcgggttttggctcacgcaacgaatcttcggggttgctcgcctttaacggtcggcgctacgccggctgccagcgtcatcgtagcccaagtaagggcttaagggtaaatttccgaatttatttttgatccactagcatgccgctgcgtagttaacgccatgaacatgcagatgccgcttagaaccgagctacgtcgagccttaagcgccgaggcgaaagtgtggccgacgtcgtcgggcggggcgcgagaggtcgataaattggaggaagaacccgttagcttggatgcgggacggttaaaggccttgatgtccgcggtcgcggattcgcgcgacatcggcgcgtttgaattactctatcgctatttttatccacgcgtgcgctcttacatggtgaagatgacgaggggaaatcggattttggccgaggagctagcgcaagagacgatgatgcgcgtctggcacaaggcggggcttttcgatccggccagggcgcaggcttcaacctggatattcacgatcgccagaaatcagatgatagactcggtgcgtaaaagttctaagcctgactttgatccaaacgatccagcattcgtgccagatgatttcgaggcggcggacgtgcttatcgagcggcagcaaagtgccgcggcgctgggtcgggcgatggcgactttaaaaggcggatatgctgaagtgctgcgcctgtcgtttttcgagggtcttacccactcgacgatcgcggaaaaactaaacctcccaattggtacggtgaaatcgaggatacgacttgcatgcgagaaactgcgtacagcccttcaggacgaagccaaatgatcgaacatcacctggatgacgatatgctcctgcaatacgcggctggaaccttggccgaaggctggagcgttgccgttgcgacccatctcgccttgtgcccggcatgcagatccaagctgtcggtcctcgaaagcgttggcggatattttatcgatagtgaaattgcaaatgacaccaatgtttcgcgagactgggagtgcttgaaggcggaaatcgatgcaggcaagattgacaaggttgtgcctattaagaagcgttctgattccgaccggacatacccagagcctctgaggacctatatcgacgcagccggtggtctgcggtggcgaacgcttgggcgcggcgccgcccagatgatcataccgaccggcgacgaaacggcgacgttgcgattgctcaagattccagccggtcagccagtcccggagcattcccatcggggcgttgaattgaccctggtgcttgatgggagcttcagcgacgaagtttccacgttcgctcgaggcgacatcgaaatggcggatgacagcctgatgcatcagcccaaggccgatgccggcaaggactgtatctgtcttgccgtgaccgaggcgccgctccgcttcaagagccggttattacggctgatacagccaatgctgggcatctgaggcggggcatcatccttgtgacgtcgcaagtcagctcgcttgcttggaaacttcaccagctatttatccaatgtttgaaccgaggccgccgttattcgtacaagctctaccgagccaaggactcaagcccgagaataaggacaagctcacgaaaattctgacctgtcatgtcgtcgccgcggacgcgatggccagcaccgtggcgaagatgatcaaggacgatggcggcgagcatgacatcaagaccgtcggcggctgtgtattaagggcgaaggaccacatgggcaagatcacgctcactgacgaggcaggcggaaccgcgacggtgacgatcgctgatgtgaagcagtcgaacggcgtgatccacgtgatcgacaaggtacttcttcccaagatgtaacttccagcgccgggctagtttggtgcatggattttcagggacagcaaagccactactggcactttcaaaaggtgccttcaggaacatggttctccttcaaaaacaacaaacagggtatttgagaccggctcgtggcaggcacatgcggtcttccacgtttatcgattaacctccttccagaatgggccggcgaccgagccgccggccccccgcggagccaatgacgatccgcgccagctcctggggcgtggagccgggtccagcgagtaagtagctcgcatgggacgattttgttacggagtactcgagcactggatcaaaaaagattcatgtgatgcagccatgcgtccggaggatcgcgagccagcaatcattgcacggttcgtggatgtggccgcggaagcagcactgtgatcaagatgtcgtcgcctatctattgtcagggctccgcgacccacccaagccgcggctcgcatccaaggttccagaaggttacgtggcggccgctggtaggaagcctagctgtcaggcggcggaaggaagctagcccctcgctcgacgacctgctcgatcccgccgacaatttccttcgccgcattgctccattgatgatgatcgtatccgagaggaagccgttggccgggcagagaattggcgggcttgcaccggttgtcgacgatcgtccagccctcccgcgcctttcgaccgccctgcaaggaaccgttcgccacggcggacggatcacgaattagagattcaattccgagcatcgcggtcagggcagcacatccactcggttgagcgtctctcgaaccatcgggttatgaagcagacgcgggtttgtcatgttgcttccatccaagaccttgctgacgcggatgcggcgaatgggtaagatgtgctgtcgacggaagctcattaattggaaaagcctccaaacgcttaagaaggaccgtatggtcgtgtatgaataacgggccaatggccgaagttccgaaactgcaagacgcagcgcattaccctcaacatcttccgtggccattgacatgtcgtgtggatgacagaagctgacgatccagcactcggaacggagatggagatggtccagtcgatcgtggaattgcggaacgtcccgggcacggaagcggcagtcgggtgggctggcggtcacactgtggtggtcgacagaccagatggtaaggctggtggcatgggcctcggcttcaacggcggccagctgctggccctggccatcggaggttgttactgcaacgacctccgctatgtcgctcacgatctcggcgtggccatcggagagatcgaggtaacggtgaaactggacatcgacggggcgcccctagtagtgaccgacgtcgtcctctccgtgagatgtacgacgctgcacggccccgatgcgcagaccttgatcgaccgcgcgtggaaggcctgcacggtcgcaaattccctgagggaaggcgtgcccacgagattattggtgattgacggctcatgacgcgtccggccatgctggccagccttgtatcctcggacagacgtgctttaagaacctccaatatcctgccttgctggccgccgaacctgtcgatgaagggtgcgacccttcgccttagccgatacttccggcaaatcttttggcgtatcggcggcacgatcacgctagcggtcatggaaacactcactatcgaaaatgggctcattaccgtctggcgggattattttgatcccggtgacttcgatagacagctggctgccttgtaaagtaaggtcgaaacgataggcccggtgcgtgcgctatcgggcctatcgttccagcgtcagacctgggccatgcctccatccacagccagttccgcacccgtcgtgaagctgctctcgtcgctggcaaggaatagtgccgccgccgccacctcatcgggtctagccatgcgtccgagagggaccatgctggacaaggcgtcccgaacctcccgtgaggcgctcgccatcatcgctgtatcggttggtcctgggctaacgacgttgacgcgaatgcccctgggagccagttcgttggcaaaggtgcgtgcaaacgaacggatcgcggccttgctcgcaccatagacgccatagcccttggtgccgatgtcgcccgcaatggacccgatcagcacgattgtgccaccgtgtcgcatgagatctatcgcaccttgagccgcgaatacgagagaccggaaattcaagccaaatgtccgatcgaaatgatcctcggtaatgttttccagcggcgcgtattcagacaggcccgcgttgatcacgagcacatcgatccggcctcgttccgatgcgatatgctcgaatacgcgcttacgatcggcattttcgctggcgtccgcttgaatgaccctgatgctgcccgtggtccctgcctttgatgtgctgtcgccacccttccggctggtcgcgaagacgtgcgcgccttcgctggcgaatctctgcgaaatggctccgccaatcccgcccacgccgccgatcacgagggcgatcttgtttgctaagctgctcatgtgaactccatttataatgaccgagaacttgatatatgagctatacctacggtcaattacgcactacatataaagcagatatcgaggagtatacccatgtcggaagtggaggctgttctttcacccaaagacagcttgtctcgtcgggcaaagcccgtctccaaggaggcgttggtggatgtcgagaaggcacgaccggtgctagagcagatcgccaacaaatggtcggtcctgatcctgacggtcttgtgcagcaggccgtcacggttcaacgagattatgcggcgtcttgacgggatcacgcacaaagcgctcgccgacgcattgaaacggctagagcgcaatgggctcatacgccgtgaagtgctcacgacaacgacgcctgtaggcgttgaatataccatcacgcagctcggccgttcccttcagcagccgttcgaggcgctatacgcgtggtccatgaccttcggtcctgagcttgagcgggcgcaagtggaatacgatcgccagcgagactagttccctggcgatcgtaatgcgtgctactgtccgcctgacgcgcggaccaccaacttgccaaaatcgcgcccctcgagaagacccatgaatgcggcaggggcattttcgaggcgtcgatcatgtgtccccggtacttcagccgggcgtcagcgatccaagccgcggcttcctttaagttcatgcaagaccatgcccgaaattaatcgttccaggcgacccgggccgtcgagaggccttgggagctgagtgactaaggcagagcaggcagcacggattgcgtccatcgtttgctagtgtcacgtttttgccaacattcgcggtagcgttatccgcgcttgatcgatcgccgcgcaaccgaaaatttttggcggacttggaccatgccgacttatgagatagaccagccttcaatatcttttcagacagctgctaggacgcttgcggatcatatggaggatttcgcgaacgagctgtccaagttaccccgctcgatcgagcttactgcccttgaactcaggtttgcgatgctgcgggctttgatggaggagcgactgaccggcgaggacctgccaccatgcggggcggccaatcagaacttcgcggctcaggagcgactttcccgctcctgatctatgctgaagggtcttttgaaggtggcacgcaatgcgataactttggcatatgcggatcaacccttagctttaagcagttccacgccacggtcggtagtcggagaagacccgatgatcgacccgtttcagcgggccgtcacctatctgcgtgtctcggcgaccgatcgctgcgatttccgccgcacctattgcatggccgagaacatgaacttcctgccgaggaaggatcttctgacgctggaggagctgaacaggctctgttccgcctttatcgccaagggcgttcgcaagctgagactgaccggcggcgagccgctggtgcgcaagaacatcatgcatctcgtgcgccaactcggccagcagatcggctccggtctcgacgagctgacgctgaccaccaacggctcgcaactcgcgcgttatgccgacgagctctatgattgcggtgttcgccgcatcaacgtgtcgctggatacgctcaatcccgacaagtttcgcgagattacccgctggggcgacttccacaaggtcatggaagggattgatgccgcccagaaagcgggcctgcacatcaagctcaacgccgtcgccttgaaggatttcaacgacgtcgagatgcccgagatgatccgcttcgcccacggtcgcggcatggatctgaccgtcatcgaaaccatgccgatgggcgagatcgaggaagaccgcaccgatcgctatctgccgctctccaagttgcgcgccgatctcgaaaagcagttcacgatgagcgaaatcggctaccgcacgggtggccccgcccgctacgtcaccgtcgaggaaaccggcggccgcatgggcttcatcaccccgatgacccataatttccgcgagagctgcaaccgcgtgcgcctcacctgcaccggcacgctctacatgtgtctcggccagaacgacgccgccgatctgcgctcggccgtgcgcgccaccgaagacgacggcttgctctacgccgcgatcgacgaggcgatctcccgcaagcccaagggtcacgacttcatcatcgaccgcacccacaaccgccccgccgtcagccgccacatgagcgttaccggcgggtgatccaaccggctctccctgggggaagttcctgaacttcaacggtcgacaaccacccgcgcgcggcaagggactgtttcaaaggcaaggtgtcacggcgctacgacgagaatcggccatttttcaatccgactaagcgtcgtcgaacatcccagtcggaagcccgtcaatgctgtagctgttcttctcgcggcgatagatctcgataccgtccgggccctttgcgttcgtccattggtccaggctcgaccgctcggccttgtagtcgaacagcggaacgccgaagccgcaggacgtttgtaccagatcgatttccagcaagatgaattgacgggctccggaaggttccgagcctccaaaatgagtgagcaggatgttgccgtattcggaactgtcacggcgtatggttcgcccgcggccgtaaagacgcaagatcatcggcggcccttcgacggcgcaaaacatgatcgtcaggcgaccatccgcgcgcaaatgcgcggaagtctcgtttccgctgccggtcctgtccaggtatacaagattgttcgcgtcgatcacacgcaggcagcccgtctcccgaggcgaaatattcacccgggaatcgccggtggccgaggccgtgaagaaaatgtgctgccgaccaatgaagtctttaagacgagcgtcgatactctcgaactgctttgccacggctcatgcgcctcgtgttttcatgaagatgggtgcaaatagccacgagcctaattggaaatcaagcagcagaccaccgcgcaggatcacctttgacgttgggttccccgcggcgacgagtgacgccggagccgtttcaccagtatggcgacctcgccctgtgaatagagcgcggcactgcgcccgggatgactactgcagccacgatagagctgctgaacggctcccaaccgtatgatcgggagccgttggcggtattcgcttcacttgatgcgggcgctgaccttttcgattgctttgttcgcgcacgcttcgtccaggttgccgcccggtgcgcctgcaacgccaatcgcgccgatcgtatccttgccgaccttgatcgggacgccgccggctagaacgaggaagcctggaatatccgacataccggccgcgaccgggttcttggacacattttcggcgatggcgcttgtggggttgcgcgacgaggccgaagtgaaagccttctgcgtggacgcatcggtggtgtgggcgcccgcgttctcggagcgaaccagcgcaagaaggaccccagatcggtcggtcacggctgctgacacgttatatccgtcggccgtgcatgccgaaacggccgcctgggcgatatcaaccgcgagcgtggtcgcgatactggtctgcttcacggtatcctgcgcaaaagccggggcggctacaagcgcgctggcggtaagggcgagcataagggttttcattttgtccgctttctttccattgttgatggcttccagcttaaagggagctagcttggagtatattcgctgtgtcaccgagtgggatcggtacgattaccgatgtcccatgagccagatgcgggtttgctcggcgactgccggcgttccgagtttagttgcaatgctagcccgatgactgtcgacggttcggaccgacacatcgagcgcgaccgcgatgtccttgcttccaaaaccctttgacaccagctcgatcacctccagttctcgggatgtaagatggtcgagcaaccgactgttctcgtcgcggacgagtagatcgtcgagcgcggcctcgcaggttgcgattgtttccatcagcacgtgctcatcgactggctttgcgaggaaatcgaggacgccggccttgaacgcacggcgacatgcctcgacgtcgccgtgtcctgtaatcatgatggcaggccagcggatcccgagatcctcgagcctcttcagaagctgcaggccgctgatcgcgggcattctgagatcaagcagcatgattccgggctttgccttctccacatgagcgaggaggtgggccgcgtcagggaaggccgcaacttcttttccataggtcgcgagcagaagcgtcatcgcctcccgcaccgcaaggtcgtcgtcgacgaggtagatcacgtgggctctcccagtggcaggcggatgatgaaactggcgccgccgtcattgcgtgcttccagactgccatccatccgttcgatcagccgtgaggacaaaggcaggccaagacccaatccgtcagccttggtggtgaagaacgggtcaaagatcctgtggagcgaacccgtctcgacgcctggcccattgtccgcgacaatgatcgcgacgccgtcgccctcgcatcgagcctccaatgtaatgcgcggagaggggcgcccaccgagcgcatcggcggcgttccgaacgaggttgtgaataacctgctgaaacgaaaccacatcgatcgggacggcgggtaggtccgagggaacgttcatgttgagggtgattgcccgcgcgtcgatgtccgcttcaacgagtcgcatggcttcaatgatcgcctcatggagagggaccattttgatatcggccggcgcacctgaaatatatgcccgcatgcgcccaaggatatctcccgcacgcttggcctcgcgaatattcgcctcgagtgccttttcgaggatatcctgacggcccatggccaatgctcgtcttgcggcctggctctggctgagcattgccgctaccggctgggccagttcatgggcaatgccggaggccatttcgcctagggcattcacgcgcccggcatgggcaagtgtcgcttcctgttttagaagtgctgctcgtgtctcgtgaccacggcgttcagcttgggtttgcaggtacgacacggacaaccagatgaccgccgcccagccgacgataagcggaatggccaaccggagcgggaccagttcaatgatgccaaaattccggccgatctccagctcgagtggctgggtatggctcgtcatcacgatcccggtcgtcgtggaaaggagccctgcatcgatggcaccatgtaatgccaaggtctcatcgttcaacgtcagccttgtggaatagttctggggcggctcctcaccagccagcaaggcattcgcgtcgatgcgcagacgcaagatccgaccgggctcgacaagcttgaaaagatcgtaggcgtggatgccgggcagggcgcgcgttgtgatttcgccgacattggagagctttggcagatcgtcgagggtgcgcccgccttcctcccgagccccgccggcatggccgtagcggaaaattcgcgccgcaccctcatcgagacggaacgtggcaatttcgacgatgcgagggtagcggaccagaatgttttgcgagaggccctgaatactcggcgacggctcctccggcgacattcgtacgatcgcgcccagcgcgctaaggtgtgcatcgtgctgcgccagcttctcggcgagaagcgtttctgtggcaccagccctgtccaacaactcctgccgacccgaccgatattcgaccgccgtgagggcaagaatcgacagcgagctggccgtgacccatgcgaggacggccttagcaagatgagtgcgctggtttagaaagctatgcatgacatatgacgccgcagggcatccgctccgtcgttgggtggtttatggtcaaatcaacacttatcggggggacgcggcaatcggtaatcctactggaacagaactgccggatccacagggacgggccagatagacggcgcgataacggtgccaaatcggaggaggcgggaccacaaagggatagggttgccaccgcgggccgctgagatccgcatctttcgcgatatccctaaaggatggaaaagcggcaaatcccgcagcggacacgccgcgagacggaagcggtcccaggatgtcaccgaatttgtaagcgaccaacatcccgaccattacaatcgcgccgccgtgagcgacaccggctgagactgccagcccgatcgcacagaggcacatgttcgtcgccaggcacgtcattgccaactgccccgtgatgtgctcgcgtcggcggaaaaggttgacatgaagccgatccagctgaagcctaccgccaagcataagcagagtgattgcatcttcgatccttagcgaaatagtgaaaccgacacccgacgaactgtcatgtcgtttgcagctcgcaaggcgaaatccatagcacgattatcccggtcattagcgccatgccccggcgctcacggtcgtgagcgccgcgagacattggcgatctcgaccacggcccatggtggcccgagaggaaagcgggatgcactttgggaccgcggctccgatcacgcgccaccgggcgcctgcctcgcccgagggggtggcgaggtgaaaggcccgtcgtcgcattcgtttgggctttgctaagccgtcagagcgtgctgccgctggcaccgccgccgtggccttcattgaacgccaatcgagcatggagttgatcgatcgcgcgttggaagacggcgggatcatcgagtgcccgggagaggacgatcgcgccctggatggcgagaacggcatcttccgagaggaggcgtgcctgctcagcgtcacggccttgccggacgagcgctgcttgcaaagcgtccacccaagcgacgaagtaacgccggatggcctgcgcgaagaggtcccgggtgttggcaacagccagggcaccgacgagacagacgcgcctgcccgacctgaagtatgtcgcggtttcattgagcattgtcgctatcgcggcattggcatcgtccccgtctcgcaggggagaatagacggaatcttcaaaccattgctctatctcggcgagcacggcccggaccatctcctccttcccattcgggaagaagtggtacaggctgcccttgcccaggccggtggccttgccgatcaaggcaaggctcgcaccttcgtatccatgctcgcgaaaaacttcggccagggaggcgatggcatcagatctttcagcgaccatgcgggccatgattagaggcccagatcgctgaggctgggatggtcgtccggacgacggccgagcggccaatggaacaggcgatcgccttcagcaatcggcatttcgttaatgcatgcgtggcggtgcgccatcaggccgtcctctgcgaattcccagttctcgttaccataggcacggaaccaatggccactgtcatcgcgatattcgtaggcgtaacgcacagcgatgcggttgccggtgaacgcccatagttccttgatgaggcggtattcatgctccttgttccacttacgctccagaaatgcctgggcttcttcgcggttggtggcgaattcaacgcggttccgccagcgggtatcgacggtgtaagcgagggcgaccttggcggcgtcgcggctgttccagccatcttcggccagacgaactttttcgaccgcggtttcgtgatcgaacggggggagaggaggacgtgacatgttgattttcctttgtaaatcgcttttcgtgtactgattggtaaacgcttgactgattggtacagtagtcatggtgatttttggtgtcaacgattttttgaggcgtcgtgacgtttcttccgacggaattttccgatcgcgaaccgagaggcctggcggtcagaacgccacgcgaaggctgatcaaccgcgcgaccatggacccgggcgcgccgacggcaaatcaagcggtgcttccgcatcgatctttcgggtagcaaaccgacggcctgaggcggcgaacggatggatcagcgcagcgacgctgcaagactgccccgccatgttggcgacctggcaatgagagacatgcgttttggcggactttggtgccgcgcgcgggctggaatggcgtcgcaatcaaaaagggatgtcacgcctccttgcgaggcgagcggcaaatcggcgttgggcgctctagcccggacgcccatcgcgttgctgaacgatgggaaaccccatggaacaatggccgacggggttgacgggcgaaggtaagaaatggcggaaagcgcgccttgtcggcctatgggcggggcgtccgagccattatggaaaaagaggcggcgcccaatctggaggccgcccgtccggcgatcagttgttggtgtcgcggaggatctcgaacaggaaccagacacgcttctcggtctcgtcgatccagttttccagcagactggcggtcgcgacgtcgccatactcaacgcagaggtcatgtagcgagcgcatgctggccacgagcgaaccgttgtcgtcgcgcaattccgcaagcatctcatgcggatgaacgaactccgcgtcattgtcggcgatgcgctgcctgcgcgagatatctccaatcgaccgcagggtgctgccgccgaccttccgtacccgttcagccaacggatcggtcatcgcgaacaactcgtcgccgtgctcgtcgagcaggagatggtagtcacggaagtgcgatcccgacatgtgccaatggaaattcttggtcttgagatagagcgcgaacacatccgccagcaaggccgtcgcgccagcggagatatccctgaccgcgtcgctgcccaatcctgccggagttttcagcgtggcggcgccacgcgacctaatctgttggtccatgaccctattccgttcttggaaacgaattgattatgccgcccctgaggcgccgggcatcgcctgagcgggcggtgcggcgtaatccggtggctcgcggctttcgaagagggacaaaagcccctcttcgtttttatcggccgagacggccacggcgcgggtcatccacaccggaccggggtcagcccttgataaaggccagcaggtccttgttcagcacgtcggcattgacggtgagcatgccgtgcgagaagccgggataggtcttgatctggccgttcttcagaagcttgatcgacttccttgcagcatcggcgatcggtacgatctggtcgtcttcgccatgcaggacgagcgtcggaacggtgatcgccttcaggtcttccgtctggtccgtttcggagaaggccttgatgccgtcatagtgcgccttggcgccgcccatcatgccctggcgccaccaattctggatcacgccttcctgaaccttggcgccgtcacggttgaaaccgtagaacgggcccgccggaacgtcacggaagaactgcgcgcggttcgcggcaagcgcggcacggaagccatcgaacacttcgatcggcaggccctcggggttggcggcggtcttgaccatcagcggcggaacggccgataccagaacggccttggccacgcggccggccggctggccgaactttgcaacgtagcgggcaacttcaccaccacccgtggaatggccgatgtgcacggcgttcttcaaatccagcgcttcgacgacggcaaaagcgtcagcggcataatggtccatgtcatgaccgtcggcgacctgggcggagcggccgtgaccgcggcgatcatgggcaacgacgcggtaacccttcgacaggaagaacagcatctgcgcatcccagtcatccgacgacagcggccagccgtggtggaagacgattggctgtgcgtccttcggaccccagtccttgtaaaagatttcagtgccgtccttggttgttacgaggcccatgtcgatatctccttgtactgaattgtttgtggaagagttgtgtgagaaggcgagcgccggaatgctcacgctggcaagtgcgatgcttccgatcagtacgctgcgtctcgacacgaaaaaccgatctgcatcggatgccattgtatttctcctgtcgcgccgtgtttgcgaattccgtatttgacaaatagaaggtatcgccatcttctggcggaaacacgtggcggaaatgactttatccgaggcaaaagtggcaaaacgcaaggaacctgatttcatagaggtggggttgctgatctacccggattgtcagttggccgctgtctacggactgaccgatctgtttcgcgtcgccagcgactggtcgacggatctgcaagtgccgaccagccttcggaaaatccgcgtcagctactggaagatggagggaggagatgtgtcctgcacatgggattcacgacccggagctccgcatttgctgagctacgttatcgcgccaccgagcatcatcatgccggagaagatgcaaagcatgagccccgcatcgcaatggctcgcgtcccaacatgcgcgtggtgtaaccgtctgctcaatctgtgccggagcgtttgtccttgccgagaccgggctcatcgacggccggcgcgccacgactcactgggcttttgccgaaaggcttgccgaacagtttcccaatatcgacgtctcgccggacaatatgatcattgacgacggtgacgtcatcaccgcgggcggtattctcgcctgggcggatcttggactgctgcttgtcgagaagctgttggggcaggcggtgatgctggagacagctcgctttctcgtcgtcgatccgccgcgtcgcagtcagagccagtacaaggcttttctcccgcggttcgaccatggcgacaaggaggttctgcaggtccagcaccagtttcatgcgacaccagagctgcaaaagtcgattggcgagcttgccgatagtgtgcgtctttcggagcgaaccttacagcgccgctttcaccgcgcgacacggctgaagctgaccgaatatctgcagaacgtccgcatcatgaaggcgcggcagttgctggaaacaacgaacggctccgtcgagagcattgcctgggcggttggctataccgatccggcggcatttcgaaaaatcttcggcaggttgacgggcgcgaagccaaacgtctatcgcggcgacgcgcggctttgatcgtgtcaaagatgtagccgaccgctgatcgtcggcccgccggaaattgccgcttgcgtccgcgaggtgagcggtgatgtcggttcgatatcaaactctataagcgcacccacccggttatcggaagttaccgacgtttcggtctgccgcggctcaccagcatagccgattgtgaacccgcacctggaaagcctcgccgggtgcccggctctcccgacaacaaaccgcgccagtgcgggcgggcactggcgcggtcgatcagaacgggcgtgttggtcagaagccaaaatcgctcaaggacgggtagtcgtccgggcgccggccgagcggccaaaggaacttgcgatccgcttcggcgatcggcatctcgttgatgctggagtggcgatgcgacatcaagccgtctgctgcaaagagccagttttcgttgccataggcgcgaaaccactgtccgctgtcgtcgcaatattcgtaagcatggcgcgcggctatccggttgtccttaaatgcccatagctccttgatgagcctatactcgcattccttcttccacttgcgcgccagaaaggcctgagcctcctgccgattggtggcgagttccacgcggttgcgccagcgggtgtcgagggtgtaggccagtgtaaccttggctgcatcacgcgagttccagccgtcttcggcagtcgaaccttttcgatggcggtttcccgcgttaaggaggggaaaggggggcgcgtcactggcgttgccttcgtgatctgagcggtttcggcaagcgccgacccagcgagggccgcagcgggcggtgcagcaataaaagggcggcggttcataagattcacctgtcaagaaatgggggctgtaacgtttcgcggggaggggaggcgatgaaagcctcgcctggacgatcgaccgcgctatcgccgcaagccacccggggatccgagttctgcacatcaactcgaatcgggcggggtcaagcgcggtggggcgcgtgctgaaggccagacaacccgcaatgcgtcgcgtcgcggcctagaagaggcagcccgagcgcccaaagcgccgcgctgcccatcggcgccgtcaaaacggcttggtcggaaggtatttgccgtcgagcgtgataacggcacgggagccgccttccggatcttcaaccttttcgactttcaacgtgaagttgatcgcgctgataatgccgtcgccgaacttctcgtggaccagagccttcagcgtggtaccgtagacctgcacgatttcgtagaagcgatagatagtcggatcggtcggtacaccatttccgaggctgccgcggaccggaacggtctgcagaagtgcaacggcgtcgtcatcgaggtcaagcgccttgcccacggtcttggcggcgtcagccggaagcggatgctggccgagcaaggcggcggtgacgaaggcctcggacaggccggtgccttgggtgatctgggcatagctcaggtccttcttgagcttcgatgccagaatgatatcggtcaggtcctgacggctgttctgtgtggcttgagactgtaacatttgggtgctttctcttgttgggattgggatgttggtcttgaggggtcaggcaacgcgtcttgcttgatatctgatggcctggacctcgggattgtcggcaagcgaaacgaaggcgcccctgctgccatcgaaagcttcgatgtttccgctcgcgatgtcgtagatccagccatgcagggcgacgcggccctcctcgagagccaggcgtaccgatgggtgggtctggatattggcgagctgtgcgatgacattttcacgcaccatggatgcgaccttggcgggctcgtccttgtgctcgcgggcctcgttcaccacacgggcggagtcggcgtaacgcagccagctgcccacggcaggcatgtggtccaggcacttacaggaggcgatggcggtcatcgcgccgcaatcagagtggccgcagatcacaatgtcagagacctgcagagccgcgaccgcgtattcgaccgaggcggaaacgccgcccggctcggggccgtaggacgggacgatgttgccggcgttgcggataacgaagaggtcgcccggttcgcgttgggtaaccagttcaggcaccaggcggctgtccgagcaggaaatgaacagagcccgggggttctgctgatttgccaaatccttgaagagcttaacccgctcaggaaaggcctccttctggaacttcagaaagccgtcaataatgtctttcatcgctgcgatctccgtttcgcgatctgttgagatgaaagctaagggccgcatggcataatgtaaaagtctcgtttattatgcgatggattagataatcttataggtttgatgatgctttctcgacaggttcgctatttccttgcagtggcggagcaccagagcttcacgcgggccgcggaggccatgcatgtctcgcagccggcgctttcgcagcaggtcaggctgatggaggaaagccttggcgtgcagttgttcgacagatcagggcgcatgacacgattgacggattccggagaggtttatctccaatacgtgcgtcgtgcttcgcaggagttccgggaagccaagcgcgcgctccacgatgtgaacgacctcagccgtggagggctgcgggtggcagtgacgccaacgttcacgacctatctggtcggccccctcgtcgaggcgttccacagtcggtacccgaatatctccctcaacctgcgggaaatttcgcaagagcacatggaggatctgcttctgtctgacgagatcgatctggggatcgcgttttccggaacgccgacagccgacctcgatcttgagcccctgctggtggaaaccctggccctggtcgtcagaaccggacatcctctggcgggtgaagcatcagtgggacttgaggccctgagtgcggcgtccttggtgctgctcagcgcggagttcgccacgcgcgagcagatcgatcgtttctgccgtcagcacggcattcaaccgcaggtccggatagaggccaactccatcagcgcggtgatcgaaattgttcgcaggacgtctctctcgacactcctacccgcaacgatcgccttcgcccatcaggacctgaaggcaattgccctcgatccggtgcgcctgcagcgcaccgccgtgttgatgcagcgccgggacgcctaccgaagcgccgcggccaagatcttccttgccctggcaagggaggttgcggccgggttggaagggtttgaggctgcgtgaggccaccgcgcaggtgatcagccgcagaaggcgacgtccacactcaccttgcggatcatctgcgccacttgcggtaaggcccgcacgacggcgcccttgttggtcccgatgaacacgtcctgcatggggaggcgggagtgggtcctcagcaaatgtaccgttcccgctttcagttgggtatgaagcaatctgcctggcaggatgctgatgcccgtgcctgcctcaaccaagttgaggatggcgccaaggttgttgcagacgttgaggcgaaggccaagctcgcggttgccgctcagggcattggtcgtcaaagtatggagattggacggcgcgggggttgagaatattctctgtcggagaagcatcgcttccgagacgaattcgcgcggcatctcgagtttggggctggcgaaccattcgaccgtttgacggccgagcaattccagcgcgacgttgtcgtgttcgggtggtgtcgacaggactgcgatatcgagcagcccttcggaaagctgtcgggcgaggttgtggctggtgtcgacggtggctgcaacgcgggtctcggcaaagcgaccgtcgagttcgtccagcaatgcgggaaggcacacgaccgcgaaactgtccatcacgcccactctgagtgtcggcagccgggtgttgcgcgtcttgatattggattcgatgtccctggcaatgccgatcatcgcctcggcatagtgcttgagagcctcgccctcgctggtcaattgcagctggcgcttttgccggatgaacagcgccacaccgagttgctcctccaactccttgatacgataggacacagtcggctgggtgatgctcagcttctccgccgcggcattgaagctgcgcaattgcgaggcccaataaaatgcctcgaccgccgaaaagctgagagccatgtcaacctatagaaaaattcgatcgatacctggcaatatcctaattgaattttgaattcaattactcctaagctcactcagtaagcagctcagctaggtggtcaaaaaatgtacaaaaccatttcccgcgcgcatatcctcgaagatctgccagagatagcggatatcgagtcggccgagttgcgtgagaaggttatcgacgcctgggtgttcgctctcgagcgctcgtccttcgatcgcgtcaccgacattcaaggtgagggcagccctaacattttctccctgaagcgcggcacgcaggatgcacatctgcgcggcgtcacccgtctggctctgtcgatctatgaagaattcaaggcgacctatcccgaggccaaggtcgatcgcgacatcattctggccggcggcctttgccacgacatcggcaagacctgggaattcgatccggtcaagctgaagcgctcggccgagcgcggcgatcgctacggcgacccgacctaccgtcattccgcctatggcgcacatgtctgcttgtccgtcggccttcccgacgaaatcggccatatctgcatgggccacgcaatggaattcggtcagatcggccatagtaccgaatgcttcatcatccgccaggccgaccacacctggtggctggtcgcggcagcgctcgatctttgccatcccgatacgatcgcgcaagcgggcaagaatatccgcgtgcgaccgctcgggactgaatgacgactgtaactgtaaggcgcgaaagccgaggttagcatggattacaccttccaattcggcccactagcaaactacctaccgcagttcatcagcggcttctggctaacgatgctgctggcgttcgtgggaattttcgggggcattgcgctcggcgtcggctgtgccgtcgcctccaccttaccgggctggttgccgcgttttctcgtccgttgctacgtggaggcgatgcgcaacacgccgcttctggtgcagatcttcgtgatcttcttcggacttccgaatctcggcgtgcggatgtcaccattgacgtcggtcttcatcgcgctggttctcaacaatggcggctatatcgcggagatcgtccgcggcggcatccagtcgacgcatcgcagccaggtcgaggcggccgagagcctcgggatgacctatttccagacgcttcgcttcgtcatcctgccgccggcgctcgagaaggtgttcacgcccgtcgtgtcgcaatgcgtgctgctcatgctgtctaccagtctcgtgtcggctatcggcgtcgaggacctgaccggagctgcgatgatcgccagttcggagaccttccggacgatggaagtctatctcgttatcgccgctgtctacgtcatgatgaatttcgtcttccgcgccatcttgaaccttgccgggttgctgatcttccgccgctcgcgccgcaatcttttccgggggaactgacatgcgtacctttggctcgccggaattcttcttcatatttcacgcgctgcgctggacgttgacgctgactgtcatcgctttcgtgggcgggggtctggtcggcatcgcgctcgccgtgatgcgcatctcgtcttcgagagcgctgcgcgtggcgacctccgcctatatgcagttcatccaggggctgccgctgctgatcctgatgttcatctgctactatgccccatcgctgttcggcctcgaagtcagcgcgattgcagctgccgccgtggcactgaccatcaattccagcgcgtttctcggcgccatatgggaaagcgcgcttcgggccattccgaaggcgcagtgggaaagtgcggatgccttggcactgcacccctacaaggtccttcgctacgtgattgcaccgcaggccatccggctggcaatgccctcgaccgtcggctttctggtgcagattatcaaacaaacctcgatcgcctccatcatcggcttcgtcgagattacccgtgccggccagctcgtcagcaatgcgacattcgagccactgaagtccttcctggccgtagccgccttttattttgctgtgtgtttcccgctcacccagctcagcctctggctcgagagccgcgccgcaaagcgtggagctcgtgcctaggcaatatcatcatcaacgacacgaagaaggtcgctgatcatagccggaacccaaaactgagaggatacaacatgcgcctgaaatccctattcatgcccctgatcggtctcgccatcgctctgggcgccactgcggcctccgccgcctctcttgacgaaatcatcgcccgcaagaaagtcctgatcggcgttgatctctcggtcccgcccttcggcatcacgaacgccgaaatgcagcctgatggtctcgacgtcgatgtcgccaagctgctcgccaaggatctcggcgtccagctggaactcgtgccggtcaccggccagagccgcatcccgtcgctccagacaggcaaggtcgactttgtcgtcgcgagcttcggcatctataccgagcgcgcgctgtcggtcgctttctcgaacccctatggcggccacaagtcggtcatcatcgcgccgaagggcaccgagatcaaaagcctggaggacctgaaaggcaagaaagttggcgtgccgcgcggaaccgcgcatgagaaggtgctgtcggcggccaatattccgggaatggagctggtccgcttcgacgatgacagcacgacgctgaacgcgctggtcgccggccaggtggatgcgatcgggaccgtgaactatatcggcgcgcagctgcagcagcgctatcccgacaagttcgaggaaaagacgacctatctgcagagcttctatggtgtgggtctgcgccgtggcgatccggatctcctccactggctgaacacggttctcttcgtccacaagcagagcggcgagctcggccaaatctacgaaaagtggatgaagacgccgatgcccgaactgccatccttctaagcctaatggtcgcagggggcagcataggtcgctgccccggcattcccatcgtgaggtgaacatgtctgtcgtaatcgcaaatgatatccgcaagagctttggcccgctcgaagtgctcaagggcgtgtccttgaaagtcgaggcaggtgaggttattgcactgatcgggcggagcggctcggggaagagcacgttcctgcgttgtctcaacggattggaaacggtcgatagcggccatatccagatcgctggtcacgccatgtcgcgcaagccagcggccttgcgggagctccggcgcgacgtcggcatcgttttccagagctataatctcttcccgcatctgacagcaggcgaaaacatcatgctcgcccccgtgcaggtgaaaggcgaggccaaggccgccgcgcgggacgaagcgcagcgttgcctgtccatggtcgggctaggcgatcgcttcgatgcctatccggacatgctttcgggcggccagcagcagcgcgttgcaattgcccgctctcttgccatgcgccccaaggtcctgctgttcgacgaggtgacttcggctctcgatccggagctgaccggtgaggtgcttgccgtcatcgaggatctcgctcgccagggcatgaccatgctgctcgtgacccacgaaatgggtttcgcgcgccgggtcgcaaaccggacaattttcatgaaggacggcatcatccacgaagaggggccgtccgccgaatttttcacaagtcccagaacgcccgagctgcaagcctttctcagatcagagatcggctgaccgccacgtaactcgttttggctatcacattgagcccccggtcgggaggagaggaaaagctttgtcgaaaaaacgaaaaatcgcactgatcggttgcggcgtcatgggtcacgcaatcggctcacgtctcctgaaaaccggccataccgtcgttgcctttgacgtggattcggtcaaggtggagcagatgaccgcccagggcgcggaggcagcatctaccgcatccgacgccgcgtcgcggtccgacgccgtcgttctcagcctcaactccgcaacgatcgtccgcgaagcggtgttcggttccaccggcgtcgtcaaaggtgccgcggccgggaccgtggtaatcgacatgtcatcgatcgacccgatcctgaccaggcaattcaatgcagacgccgcggtgctcggcctaaggtggcttgattgcccgctctccggcggggcgccaaaagcttacgaaggcaagctcacggtgatggccggtggtagccccaccgactttaccgaggcgaagctgatccttgatgacctgtgcctgaacctgaccctgatgggcccgagcggggctgggcagacgaccaagcttatcaatcaggtcctgtgcgcgctcaatttcgtcgccgtggcggaagcgaccaagctggcaatcgattccggtgtcgatgcgcagcggatccccgcggcgctgagtggtggccgcgccgacagcgcgatcctgcaggagttcatgggcaagatggcgcgcaacgactactcgccgaccggccgcatcgacaacatggtcaaggatctctccgccgcgcagtcactagccatccacaccggcacggcaatgcccatgacatcgctctgcatggagatccatcggctgatggtctcagcgggcctcggtgcggcggacaatgccgccctgatgaagttttacgatggcccgaaggcctgacgaggaggaatgacatgctgatccgctacgcagaattcgttggaacgatcaaggctggcaaggaggacgaattccacagtttcgtggagaatacgctgacgccactatggacaaaatttgacggtgcggtgagcgtttccgtctgccgcgagctcgaacgcgacgagggtgcgccctccacgcctctcattgttgccatcacctatccggaccacgcagcgcttgagcgcgccatggcctgcgacgcacgcttccagtcgcgcgaacagacacggcacctgctgaccatgttcgacggcaaggtctatcaccgcgtcacgagtgccgcgatccacgatctctcggcacaggggtaagcgcaatgacgttcccgcttttcgaccttgccggtctgcgagcgctcgtcacgggctcgtcgcaggggatcgggttcgcgcttgcgcgcgggcttgccgagcacggcgccgaggtcgtgctcaacggtcggaatcagcgcaagcttgatgtcgcagtccgcgaactggcagacatcggcgtccgggtttcggccagcgatttcgatgtgacggatgccgacgcggtcaagcgcggcgtcgacgcgatcgaaggcagcaccggcccgatcgatattttgatcaacaatgccggcatgcagtttcgcggtccattggaggagttcccggtggatcgctgggaggggttgttgaagaccaatatctccagtgccttctacgtcgggcaggcggttgcccggcacatgattggccgcggccgcggcaaaatcgtcaacatcgcctcggtacagagcgaactcgctcgccccgggatcgcgccctatacggcaaccaagggcgctgtgaaaaatctgacccgtggcatggcgacggattgggcaaaatacggtctgcaaatcaacgcattggcgcccggctatttcagcacgccgcttaatcaggcgctggtcgacaatcccgagttcacggcgtggttggagaaacgcacgccagccggtcgctggggcaatgtcgaggaactggtcggcgcagccgttttcctgtcgtcccgagcatcatcttttgtgaatggacacacgctttatgtcgacggcggtatcacaatcagcctttgatccggtggcattggtcgggcctgttgtggtcatgggcgtctcgggctgcggtaaaacctcggtgggggacggccttgcccgccgcatcggcgccgatttcatcgaaggtgacagtcttcatcccgcggcgaatgtcgaaaagatgcggaaaggctcaccactgcatgatgccgatcgctggccctggctcgatgcgctcggtcgggcgctgggtgccgacggcaatttcgtcgtctcctgttcggcgctgaagcggtcatatcgcgatcggcttcgggcgctggccggcaggcctgtggtcttcatctatctgcatggcgaccgcgacgtcctggccgcgcgaatggcggcccgcagtcacgattacatgccgctatcgctgctcgacagccagctcgcgacgcttgagcctcctcgcgcagaggaccgggtcgttgcgatcgagatcaatcaaccgctggaggcgatcgtctgcttggcgctcgaatatctggcgtcgccaaactgtccttgagaccggatacaaaacaaatggaggaaaccatgagcaagccgaacatcctgatgatcggaccctatccggaatgggatatggtcgaattggaagcgcagtttgaagtacacaagctttatgaagcccccgatcgcgaggcgtttctggcgcagcgtggcgccgatatccgcggcatcgccacgcgcggcgagcttggcgcctcggccgatctcatcggccagttgccgaagctggaaataatctcggtctatggtgtcggttacgatgcggtcaatctggatgcggctcgcgcccggggtatccgcgtcaccaacacgccagatgtcctgacgaacgatgtcgccgatctcggcattggcatgatgctggtgcagtcgcgtggcatgatcggcgcggaaacctgggtcaaggacggcagctggacggccaagggactctatccgctgaagcgtcgcgtctggggccgcaaggccggtgttctcggcctcggccgcattggctgcgaagtcgccaagcgtctcaagggcttcgacatggacatcgcctatagcgacgtgtcggccaaggatttcgccaaggacatgaccttcatcgctgatccggtcgaactggcagaccgctccgacttcctgttcgtaacgctcgccgcctccgccgtgacacgccatatcgtgtcgaagccggtgatcgaggcacttggtccggaaggcatgttgatcaatatctcgagggcgtcgaatatcgatgaggatgcgcttctcgacgcgctcgaaagcggcaagcttggctcggccgcactcgacgtgttcgaaggcgagccgaagctcaacccgcgttttctgacgctcggtaatgttctggtgcagccgcatcatgcatcgggcacgatcgaaacccgcagggcaatgggcaagctggtgcgcgacaatctcgcctgccactttgccggccagaccctgccgaccccggtgttgtaaggagatcccgatgaaagccgtcgtcatccacgccgccaaggatcttcggatcgaggaacgcgaagccgaagcgcttcagccaggacaggtcgaggtcgccatcgaggccggcggcatctgcggttccgacctgcattattacaaccatggtggcttcggcacggtgcgcgtacgcgagcctatgatccttggccatgaagtggccgggacgatcgtctctcttggcaaggcgtcgggcgaaggcgtctccggtcttgctgtcggcgaccgtgtcgccgtgtcgccatctcggccctgcaatgcctgcgactattgcctcaagggccagcagaaccattgcctgaacatgcgtttctatggctcggccatgccaatgccgcacatccagggcgcgttccggcaacgtctggtggccgaagcctatcagtgccacaaggtggccgagggcgtctcgatcaacgaggcggcgatggccgagcccttcgcggtcactctgcatggcgtcaaccgtgccggtcccttgaccgacaagcgggttctggtgacaggctgcgggccgatcggtgcgctcgcgatcatcgcggcgcgcgcccacggcgcccgcgaaatcgtcgccacagacgtgatggacacggttctcaacaaggcgctggagatcggtgccgaccgcgtgatcaacgtcgctgacaatccggacgaactgtcggcctattcggccaacaagggctatttcgacgtgcagttcgaagcgtcgggtaatgagcgcgcggtacgctcaggcctcgaagcacttcggccgcgttccactctcgtccaactcggccttggcggcgatgtttccattccgcagaacatggtcgtctcaaaggaaatagagatgaagggaacgttccgctttcatgaggaattcgggctggccgtcgcgctgatcaacaagcgccgtgtcgacctgaggccgcttctgaccggaaccttcccgctggaggatgcaattgccgcattcgaaaccgccggcgaccgaaacaagtcgatgaaagttcagctgtccttctgacatccaggtagcgggaaccgcacattgacgtctcgctccttgccgcggccgaccttgtcgatcgccgtgcgcatgttgtcgtagataccgcggccgggaatgtcgtcaaacacgcgaaatgcatgattgtgggcatcgaacagcatctcatgcgtctgaaggagataggcccgaataatgaagacgcggctaccgtcgcgtcatttgttcctctcgcatcgtgctgctcctggttgcctatccgctctttacggctgcacatggatcgatccccggtgtaattttgcttagcagcttggtcccgttccttgcgatgatcagtggtggggcgagttttggcgcgattgcgggtgcgcttcctgcttggcgacaggccgggcgcgggcaacacggcaagtgataccgacgtcctctagcgcgtgtcgtctgtgagccggccggtgccaatcacggggcattcgaacgcttcatggccaccggtggcccgtcgtttccaaggtcaatccgcgtcaggcgcgacggcttgccgaggcgattggaaaactggcggagaccgtcaacttgttaggcgcgcacagcgggcgaccgtcgcggaagcagttaattacctcgctaggtgggaagctagcgacgttatcgcacgcgcgatcccgtcggcggcgacacaagcgcctgagcgggccacgagtgtgcaaatatatggttcgcgggttcgggatccgtgctggcagacaaaccgccagcacgaaagtcaattcaggcagctgtttcttcgtccatggccgctgacaatagcttgtcgcgttcgcgtagtcctttattgaaaagcctcgcgactttcaccatcagggccccgatcgcggccgggtccgcgtcgacacctttcgcacgcgcgacctcccttaccacaccggcgcatagacgtgaatcttccttcgaaactggcgctatcattcttgtccccttggtctagcccgccccgagcggggcgggcctgcttggttgcctagaaatccatgccagcggcggccggcagagcaggagcggta

SEQ ID NO: 35 - DNA, 50379 bp, Rhizobium matallidurans
  source 1..50379: mol_type = genomic DNA
ggcccccaagccggtcgccgccaaggcaagccccgctaaggcgggctgagacaacagcaatcacacaaagccccggttcgccggggcttttttgagggctcgccgtgtacgataccgtaagatacgccccctgcttaccctcatcctgtaaaatcgctcccggtttcgactgatcgtcgcaaccgctccaacagcacgaaaaaaggggagtgagacaatgggcaagttgagaccgctaggcacgacgctattggccggactgttcctggcgaccctagccgatgtatcgtggagcacagagcaggcgcagcagcgccaggcggggcgtgacgtcaagcagacgacgcggcagagcgcgcgcgatacgaagcaggattgccgtgccgccaatcaacaaagcaacgcggcatgccggcaggacaagcggcagaccaagcaaagcggccgacagaccgcacgcgacctcaaatactgaaacgcatcgcttcggaggaacggcgaggcgtctgatttgatcttctcgccgctcattcaccaaagccagagacacgcagcgctccgcttcgacgaagcgttgcgtacctctcacatgttggcgatcacatgctggcctgcacgctgtgcaagccggcatagatgccgtcgcgcgccatcagatcctcgtgcctgccctcctcgacgatgccgtcggcggaaagaacgaggatgcggtcggcatggcgaaccgtcgacagccggtgcgcgatgacgatggtggtgcgccccttggcgagcccgagcaacgcctgctgcaccgcccgttcgctctcgttgtcgagcgcgctggtggcctcgtcgaagatcaggatcgccgggttcttcaagaacgcccgcgcgatcgtcaaccgctgccgctggccgcccgacagccgcacgccgcgctggccgatttcggtgtcgtatccgtcggggagcgccatgatgaagtcgtgcgcgttcgccgcccgcgccgccgcctccacttcggcgtcggcggcgtcccaccggccgtagcggagattgtccgccaccgagcccgcgaagagatagacgtcctgctgcaccacgccgacatgttggcgcagcgacgacagcgtgacatccctgatatcggcgccgtcgatcaggatcgacccggcctgcacgtcgtagaagcgggggatgagcgagcacaaggtgctcttgcccacgcccgacggcccgaccagcgccacgaactcgccaggcgcgatggcgaaggagaggttctcgaagacatcggacgaatccacctcgtagccgaagctgacgtcctcgaaccgaatctctcccttcggcgccggcagcgtacgggcatggggtcggtcgacgatgtcgggctcgatatcgaggatttccatcgctctgatgaagcccgtatagccctcctgccagagccgcacgaaattggccagccgcttcacgggatcgacgagcaccgccacgcagagcaggaacgtcagcagatcggcaaccgtcatcgccgacgatacgatcctgatgccgccgatgacgatgaccaggatcgtgatgaactgcgcgaagctctccgtccccacggaaaaccaggcctcgctgcgataaccgtcggcgcggctcgcgagaaagcgctcgttctccaaggcgaagcggtcacgctccagcttctcgttggcgaaggactgcacgacgcggatgcccgcgaggctgtcttccagccgctcgttgacgccggcgatctgctgcttgctgcgttcgagcgcgtggttcatgcggcggttgaaatgcagcgcgtaggcgacggccgccggtgtcagcaacaggatcagccccgccagcaccggatcgatatagacaagcaccagcatggcgccgccatatttgaggatggcgatcgagacgtcctcggggccgtggtggaacagttcgccgagccagagggaatcgccggtgatgcggctcatcagctggcccgtgcgctgtcggtcatagaagctgaaggacagtttctggcaatgatcgaacagttcctgccggacggcggcctcgatgcgcgcgcccatcacatggccgcgataatcgacgaagaagacggcgaccatctgaaccgccagaagccccagcatgaccgcgccgaccgtcaggatcagcgcattggcctcccccgcatccgagatggtcaaaagacgcttggtgacgagattggcgcaaacaggcaacgccaccgcggtcgccgcgacgaggatggcgcaggcgatatcggctgagagcaagggcagatgcgggcgatagtagccgaggaacctggctatacgggaccggcgccgcgcaacgtgagcgacggcgggataaggcccggcgttgacagggagtggtttacgacgcggcgcgtctttccgcgcgcggacgaatggaatagacatgaagcggagtgtccttgtgagtgatcgttcctttcgtgttggacaggatcgctttcatgacagtctccttcgaacgagttcgcgttcagcgtcgcgccatccttaacagatcgaccaacgggccgcaaacgcgcttggcgtaaaaattcaggaaaacacgcctgacgtgtgttaacggcgcgatggcggcacgagccgaccatgcggccgctatccggaacttcgatccggatcgggacattccggcctccgccgccggccgttcgcggcccgtcgtttcgtttcatgacagcggctttgtcgcagcctgaaacaccggcaagccttaaccttactggctaaccaatccattagcatcatgttgaaaaccaaggcagatatggcaatcttcagccatgacaaacatccgctctccaagattcaacgccgaagatatcggacggtcgcgggaatgcgaaagcgtctgcaaaggggcgataaccgaagttgtccgtcgcgcgatcgcggcgggatggcgtgaagcggaaatcgcgcttcacctggcagatgcagcagaagattacgtcatctacctggcgacaaagccggaccgccgcctgaaggcggcaaacaacaactagttgcgaatgggggcggccacggtcgccggaacaaggcctgcttacgaggggaagcgacctgcctgctccgaaacatgcgcatcgagactgcctgcggcgctaccgccgcacgatgatttgagagcggcgtcctacccgccgaacaacagcatggcctctgaagcgagaccatgctgtcttacctttccgggcccggccctcccggcttaaccttgaggccggtttctaagggcttcggcttcggcgtagaacttcttttcccactccttgtggttatccagcccttcgcggatgaatggcgtgaacacggcgaggttcatcagcgcccagttgacgaaacgggcgggaaacttcagcggcttgtcgaaatccacgaacagcaccacgcgggtcttgtccgtgtggttccaggcctcgtgctcgtaggcatcgtcgaaaatcagcgccttgccttcctgccagtggcagatctggtccttgacgcggatggcgagcttgtcggccggctccggcacgatcatgccgacatgcaggcgcagcacgccgttataggggccgcgatgcgccggcaggtgcttgccgggctcgaagatcgaaaacatcgccgtcttcaggccggggatcttctgcacggcgcgccacgtctccgggcactgcgcgatgttctgctccgacttcacgccgaagccgaggaggaagaaggtcttccagccggaatcggtcgagatcgtcttcacgtcggtcgagatatcctggaatgtcggcaattcgctctggcgcaccagcacgcgttccagctcggcgcggatctgcgggtaagcggcctcgacctctttcgcccaggggaaggtggcattgtcgtagaccggcggattgccgagcttggcatatttgaagttcagcttttccgcccaggcgacgatgcccatgaagaaccgcgtaacggcgctcggccggcccatcggggcaatgcccgaggtgccgaacgtctggccttcgggcttggaatttgcggattttggggaggaaaggtcagcagtgctgtcagtcatgggtgttccaatgcgcgatgcgtaaactgtcactcggcatatggacatcgcatccgttttgcgcaagtcgggcttctgttcggcgaggtcggaatgccgcgaccccgcggagcgtctccccgcgtgctgtctccccgcgtcactggaggccgctcggcttacgaccggccgccatgaaaatcaatggaagacgtgcatcaatgggagacggacttggagaacaggttgacgacgagcacgcccgttatgatcagccccaggccgatgatggcgggcatatccagccgctgcttgaaatagacgagaccgacgatggaaatcaggacgatgccgagcgcgctccagatcgcataggcgatcccgacagggatcaccttcagcgtcagcgacaggcagtagaaggcagcggcatagcacgcgatcatcagcatggtcggccaaaaccggctgaactgctgcgaaagctgcaacgccgtcgtgccgacgacttcgagcacgatcgccatgaacagcaacgcgtagacggcaatcggtgccatggtgggggatccttatcgcggggagatcagcgcgctgtcagctcgacgaggcgcgaaagcagggcctggcgctgcgcgtcgtcggacgcgccgccgatcatgtcggcgagccacaggccatcggccgcgaagcgcacgatctgcgcatcgaccgacgaatccgttccgacatattcttccgcccgcccctcgacccactccgcccagcgctgtctgagtcgcggctcggcgagaagcgcgatcgtcacctgcgcccaatggccggcatcgtcggggctgtcgcgcaggccggcgacggcattgagataggcgcgcgtgaaccggccatgcggcattgggtcctcgcgcatccgctgatcgagatcggcatcgaaacgcgcgagaagatcctcgaacaaggcgtcgagcagcgcattcttggtcgggaaatggtgaagcagaccgcccttgctgaccccggaggccccggacacggcatcgagcgtcaccgcgcccatcccctgctcgttcgtcagtcgcgcggcgacatccagcagctgctggcgaacgatggcgggttgcttgcggcggtgatgagcatctgacatcacacataaagataccgtctggacggttttgtcaagatgtcattcagttttggcggcgggcccggtgcgaaatgtcgcgctcgccggcgccggttccggttgcgatcgacgctccggcggtgcatgaaggagaaacttttgaggaaccgcaccgtgagcgacaataccatcaccctttacgaggccgtcggcggcgatgcgacgatccgggccttgtcgcatcgcttctacgaactgatggacacgctgccggaagcgagccacgttcgcgccgtccacccgccgacgctcgagggcagcgaggcgaagttctacgagtatctcaccggctatctcggcgggccgcctgtctacgtcgagaaatacggccacccgcgcctgcggagccgccatttcgtcgccgagatcggcccggtggagcgcgacgagtggctgctgtgcttccgccgcgcgctggaggaaaccgtcgcgaacccgaagctgcgcgacatcatcctgccgccgatcgaacggctggccgaccacatgcagaacaagcaatagggtttacacgatgacgctcaaccagcgcttctcgccgctcttcctggtgttgtcggggctctttggctttgccggcgtggcgctggcggcagcatccgcccatctcgacggcgaagggcgcttcctcgcctccgcctccgccatgctcatcgcccacgcccctgcccttctggccctggcgctggcgggtgaaaagctgaggacggcgtggcttgccggcctgttgatgggcgtcggcacgctgctctttgccggcgatctggtggcgctccggttcgtcggcgcgggcctgtttccgatggccgcgccgacgggcggcttcgccatgatgttcggctggctggcgattgcagccggcgccttcttccgcaaccgggcccgataagcctggccgggaacaaccggcttagaccggctgcggaatacggccgaagcgcagcagattgccgtgcggatcgtggatgtagaactcttccatgttccacggccgcaccatcatgtcgctgagcgtctcgacgccccgcgccttgtattcggcgtgcagcccggcaatgccgccgccgcgcagataaacggatgtccgctcgcacagcgatcgatcgtccgtcagccagaaatgcagctccatctcgtcgcggcgcaggatcaaatagtccttgtcctgatagacgatcatctcgaagccgagccggccgcgatagaaggaaagcgtctcgccgatatcgagcgatggcagaaccggcagaacctcgatgcgatctggattgtcagccaccatccgtcagattccgtccacgacctggaagccctcgaacaccggcggtcccttgtacatcgccttgcggtcgccggcattgcgatgggcggcgcggaactgctcggacttggtccagccgaggaaatcctcctcgctgcgccagatcgtgtgcgaggaaaacagcgtatagccctcctccgcattctcccggccgcgcagcagccggaattcgacgaagccgggcacctccgaaagactggaatcgcggttgcgccagacgctttcaaactccgcttccgacccgatcgtcaccttgaagcggttcatcgcgataaacatgggaacactcacgccttgcgtttcctttcggcctcgggaaattcgaacgctatcacattccggccgtcgagggcatcgcgctcgaggggcttcgccggcagcacgccaggcttgcgcgccttccagatcggaaacggctcgatattgggatagcgctcgcgtctctcctcgcgctccatcaacagctccaaaagctcgggcaccatgccgccgccatcgtgcgcggccagcttgtgcaggccgatcagcgtatacccttgcgggcctctgtcggtcatcggttggcgtcgcgttcgttcatcgtcgtcagcgcccgctcgaggctcgacttgctgccgttgcggagcggaatgaaggtcttgccgaacttcttgcagccggtcttcacccgcaggcaggcatcatggctgatacagtcgatcgggcagaagacgcagtcgacggaggggagcacggtgtcgatgcgcgacacggcctcgcgcagcccgccatcgtgatggatcagctcggcgccgaaattgctggcgatctggcgcagatgcgccacctggcagtcgcgtccgccgacgtaaagaaagctgcggccatcgagcttggaacgtccggaggcctcctgaaccgcttgcgtacccgcactcacgcggatgtcccggttagaacccttcttcgccttacgcgccattgaccacccgttccttcattgatcggcacacgatcgctgcgtgtgtgggtggaccttagtaaacttgatttttatagtaaagtataaagttgattattttgatcatattttatcactggcccgttatcatcaggccgccgtctcgtcagcgacccgtcgtcacctgcacttcctgggtgaaggtccagaccggcttgccccattccgacggcagcggcgggaacggcgcggcgcggcgcacgccatcgacgacggcggcgtcgagttcgggaatgcccgagctgcgcgccaccgacaggctgctcaggccgcccgagccattgatgctcaaccggatgcggacgctgagcgcggcgctcatgcgcctgtattcggagggcacgcgcacggaccgccggattttcgactgcaccttgccgggatagttggcgacggcggcgctgccggagccgccgcgatttccggcgctgcgcgaatcctgatcggaggcctgctcgacgccatccgacgcgccgcgccggctatcctgcttgttctcgccttcggagccggcacgggtgacgactttcttgggcggttgcttcttttccacaggcttcggcttttcgacgggcttttgcgcgagcggcttcgaatcgggcgtcggcacggtctccggcacgggcggaatttccgccgtttcggtcggctgaaccggcgccacggcctcgggggtcgcgggcggcgtctcggtcatctcgggctgaacctgcgtcggcacctcggtcgccatcggctggaccacggaggtctcggccggcgtctgcgatgtcagcacttccggctcgaccgccgtcatgttttcgggggagacgcgcgtcacctcctgcgtcggcgcgacgggctgcggatcgaccggttgtggatcgaccggcggcgtttcgggctgaacctccgtcggctgctgggcgacttcgggctgcacctcttccgccacgacctcttccggctgcggctcggacttctcatcgcccgacgatgcctgatcgagatcggaatcgccgagcatgatcacgctcaccgtttcaccggcctcttcttccggctgctgcggggcgacgacgacgccgacgatcagggcgatcgctagcgcaccgtgaaaaatgaaggaaccgatgcaggcgaccgtcacgccgagcttgccgcgatgcggccggctggccggctgctcgacgctcgcatccatcggcggcgccgcggcgtgaccgttgctggcgctgcgcgggtcctgcgggaaggaggtaatctgcgcctggcgcgtataatggagaacagcctcggtggcaggctggcgcgccacgttgcgaaggtccgacaactcgtggccgggatgcatgcccggattgttgtcgttcacaccgccatcggcgaccgcctcgtcgaagagaacatgtctcgcctttgatctcgctgaaaccaccattttggatgccttgtcccgctgcaacggacgcggccggggctaccccggccgtcactcaactcaaccttcgaaaggaatggaaacctgggagcgtgtcaccagacccttcatgcacgcgcccttttcgaggccgtcgcacaccggcgtgtcgttgatcagcacccgcgtcaccgcctcgcatttgacgttcggcatgtcgaactgccgcacccgcttcttgccctgcggcagattgcggaaatcgagaacggtgatcttgtcgacagcgttcttgtcgttgaagaaggcgagctcgaacgaaaccttggcgatgtcctcgggcaaggtgttaagcgccacgaaggtcatcatgcaacccttctgcgatggcgcgagcccgttgagctccacatcgagcgccgccttcggcgcggccgcggcggcggtgggctcctgcgcataggcctgcatcgcgcccgtaagcaccagggaaccggccgccaaaagcgttgcaaatcgtctgaccggcctcgtgaccatcatcgcgtctctccaatgaaattccaaaacttgacttacaaagtccgctattgcgtctttaaaaaatgatgactatgagagtcaagataattgtaggtcgcaggggcttttttggcccacccagagaagcaaaaaagccaacgaaatgatggtcgagaagccggacacactgaagcaaacgctattggcgcgcgatgccgtggccgacgtccgcgtcctggagagcagcgagatttttcgcggcgccaacgagatcgtcatccgccacgacggcgctctgtatcgcatgaagatcacccgccagggcaagctaattctgaataagtaggggtagacaaaatgaccgagaacaccatgccttcgccggccgacatccgcgccttccgcgccgagaacccgaagatgcgcgagcgcgacatcgccgcccagctcaaggtttccgaggcagccctcgttgcggccgaagtcggcatttccgccacccgcatcgacgccagcgccctgaagcttctggagcgcgtcgccgaactcggcgaagtcatggcgctatcgcgcaacgaaagcgccgttcacgagaagatcggcgtctacgaaaacatcaagaccggcggccagggcgccatcgtgctcggcgagaacatcgacctgcgcatcttcccgagccgctgggctcacgccttcgcggtcaccaagaaggacggcgatcaggagcgcttgagcctccagtatttcgacaaggcaggcaccgccgtgcacaaggttcacctgcgcccggcctccaatgtcgaggcctatcacgccatcgtcgccgacctgaggatcgaggaccagtcgcaggacttcgtcgccgacgacagcaagaccgccgccgacgagagcggcgacgtcaccaaggacgagctgcgcgaccactggagcaagatgaccgatacgcacgagttcttcggcatgctgcgcaagctgaagatcggccgccaggccgccgtgcgcaccgtcggcgacgactacgcctggaagctcgacaacacggcggccatcgagatgatgcacgcctccgtcaagtccggccttcccatcatgtgcttcgtcggcaatgacggcatcgtccagatccactccggcccgatcttcaacgtccagccgatgggtccgtggatcaacatcctcgacgagaccttccacatgcacctgcgtcaggatcacatcgccgagatctgggccgtgcgcaaaccgaccaaggatggccacgtcacctccgtcgaggtttacggcgcccagggcgaaatgatcatccagttcttcagcaagcgcaaggaaggctccgaggagcgcgccgaatggcgcgacatcgtcgaaagcctgcccaaggcgacgagcgttgcggcgtaggccgaaggagatgatgatgtcgaaccacgatcgtcggccatcgacggcgcaatccatgctgcggggcttgtttgccctgccgctggccgcctcgctgcttgccttctcgcccgccgcctacgcccaggaaaagctcgacagcacccgtctgatctcgatcggcggcgacatcaccgagatcatctacgcgctcggcgaagagaagcgcctgatcgcccgcgacacgacgagcctgtttcccgaccaggccctgaagctgccggatgtcggctacatgcgcgcgctgtctcccgaaggcatcctcgccatgaacccgacggcgatcgtcgccgtcgagggctccggcccgccggaggcgctgacggtgctgcgcagcgccagcgtgcccttcgagacggtcccgaacgcctacacgcgcgacggcatcctcgccaagatcgacaaggtcggcgcgctgctcggcgtcgagccaaaggcggccgagctgcgccagaaggtcgccaccgatctcgacgccgctatgaccagcgccgccaagcgcccggaaggcgaacgcaagcgtgttctcttcatcctcagcatgcagggcggcaagatcatggcctcgggcacgggcacggcggccgatggcatcatcaagctggtcggctcgatcaacgcggtcggcaccttcccgggctacaagccgctgaccgacgaagcgatcatcgaagccaagcccgacgtcatcctgatgatgaaccgcggcgacggcgcgggcaccaagaacgaggacctgatgaagcagccggcgctggcgctcacccccgccgttcagaacaaggcgatcatccgcatggacgggctctacctgctcggcttcgggccacgcacagccggcgcggttcgcgaactcacccaggcgatctacgggggctgaccttggcggtactgaacgacatggacgaacgtcgcatcgtgttttcggccgcggggatgcttgagcgtcaccgggccggcgatcgctcgctgatggcactggcggtcatcgcgctgctggtgatcggctccgtcctgtcgttgctgttctccgtcacgacaggtgcctcggatgcgtccttcctcgacgtgatcgccaacgccgccggatcggatgacgcgctgagcatgcgcgaccgcatcatcatcttcgacatccgcatgccgcgcgccatcctcggcttcctcgtcggcggctcgctggcggtgtcgggcgccgtcatgcagggcctgtttcgcaacccgctggctgatcccggcctcgtcggcgtctcctccggcgccggcctcggcgctgtcgtcatgatcgtgctcggcggcggctttgtcgcgccgctctacgtcctgctcggcatctacgcgcttccattcgcagccttcgccggtggcctcgccacgacgctgcttctctaccggatcgccaccagcaacggccagacgtcagtcgcgaccatgctgctcgccggtatcgcgctcggctcgctcgccggcgccatgaccggcctgctggtctacatggccaacgaccagcagctgcgcgacctcaccttctggagcatgggctcgctcgccggctcgacatggaccaagatcaccgccgccggcccgatcatcctcctgtccttcatcgtcgtccccttcctcgccaagggcctgaacgccatcacgctcggcgaagccgccgccttccacatgggcgttcccgtccagcggctgaagaacatcgccatcgtcacggtcgcggcggccaccggcgcatcggtcgccgtcagcggcggcatcggctttgtcggcatcgtggtgccacatgtgctcagaatggcgatcggccccgatcatcgctatctcctgccggcttcggccctgctcggtggttcgctgctgatcttcgccgacgttatcgcccgcaccatcgtcgcgcccgccgaactgccgatcggcatcatcaccgcggccgtcggcggcccgttctttctctggatcctgctgcgccagcggtcccgtctcgccctttgagtgattgtcatgatcgaagtctccggcgtctccgtccgcctgtcgggcaaaaccatcgtcgaagacgtcggcttcaccgccgcctcgggcaagctgacggcgatcgccgggccgaacggctccggcaagacgacgacgatgaaggccgtatcgggcgaactgccctataacggctcgatccgcatcaacggcgaggacgtacgcgggcttcagccataccagctggccgccctgcgcggcgtgctgccccaggcaagcaacatctccttccccttcaccgtccgcgaaatcgtccgcatgggcctgacctcgggactcaaccgacaccccgaacgcgccgagcagacggcgaccaaggcgctgtcttcggtcgatctcgacggctacgagggccgcttctatcagcatctctccggcggtgagcagcagcgcgtgcagcttgcccgtgtcctttgccagatttccgaacccgtcgtcgacggcaagccgcgctggctgctcctcgacgagcccgtctccagcctcgatatcagccaccagctgacgatcatgcggcttgcccgcgccttctgcgacgccggtggcggcgtcatcgccgtgatgcatgacctcaacctgacggcgctgttcgccgaccagatcattctcatgcaagagggtggcctcgcggctcgcggtaccgtgcacgaggtgctgaccgacgagaccatgcgctcggtcttcggctgcccgctgcgtatcaacaaggtgcccgatgacggcacccctttcgtgctcgcccacagcgctgtcggcggctgagccggcgcggaaccttttgcccacagccggcgttaagccattgatttgggtcattgccgggcatctgtgttcatgcaagcttgcgttctgatcctgtgtttaaccaggcggcgcgaaaccgcgccgtaacaatggagaaaaccagtggcatctttccttcagtccggccgtcagcgtcgcaacggcagcgccgcccttcacaacatcgaggcgacgatcgaggatcagatcgcgtcgctacaggatgaaatcgccgcgctgacaaagatggtcggcaagagctcgcgcaagcagagcgagaagctgacggcacaggcggcatccggatacgaagatcttgttgcccgtagcgaggacttgctgcgcgacctgcaggatggttatttgcgcggcgcgtccgaagtgcgcgacaccgttcgcaagcacccggtcgccaccatcggcgctgctgccgcgttcggactggtcgttgccctcctggcacgacgctaaggaggctagatgctgttcccgatcctcagcctcctggtaggcacgagtgttcaacgcaccgttgcgcgcaccaagcgcaacggtattttcattgccatcgcagcgattttcgtgctgaccgcctatgcgcttgcagtgaccgccggtgcgatatggctcgccggcatctacggcgccgttggagcagcactgtttctcgcggcctgcgcccttttgatcgcgatcatcgtgctgattgtcatgatggtgatgaatgcgcaggaggcccggcgcgcccgggaacgcaagcaggcgttggagagcgccgccgccgcaagcctcggcctcatccgctcgcaaccgcttctgaccgccggcgtgatcgccgccatggtcgccgccaatctgttcacgtcgaagggtcgcgactaaatacccggcctttttcatatcaccacgcacgaaaaaaccggcgcccaccaagggccgccggtttttttcttgggcgctgaacgctttcgtcagaaggcgaaggccttggaggtcagcggcgacgaggtcgcatccggtccgaaatcggcttcaccggtgatctgcagcatttcctgcagccgctggcgggcgcgattgacgcggctcttgatcgttccgaccgcgcagccgcagatttcggcggcttcctcgtaggagaagccggaggcgccgaccaggatgatcgcttcgcgctggtcgctcggcaattgctcgagcgccttcttgaagtcctgaagatcgagcgcgccatattgcgacggatgcgtcgccatggattcggtgaagaggccatcgctgtcctggatctcgcggcccgccttgcgcatctggctgtagagctcgttgcgcaggatggtgaagagccaggccttcatgttggtgcccatctcgaagtggtcctgcttggcccacgccttcatgatggtgtcctgcacgaggtcgtcggcgcggtcatgacggccgatcagcgaaatggcgaatgcgcgcaggctcgggagagccgaaagaagctcgcgtttgaagcttggttgctgcttgtccatcgattgaccttcacttcgctgctttggccgaggcaagttcggcctggtcgagcttttcgaggagatcgaggaaacgatccgggatcgcctcctcctggacagccgcgtaaagcgatctcagcctgaccccgatctggctgttggggtccatgatatcgcttgcacgcaactcagcacgttgcccgtctatctgttcgttcttccggcttgtcattaactcttcacttctcgtccgttgtctctaagcctcgcctgccgctgcgggaaaaccttcattccggtcccccgccgccatggtcgaattctcgccagacaaccttctcggaatgcatgtagtgtcgcaggtcggtttacgatgagccccttgtcgtgggcagtagaatgcgcggcggtaaaaaaagttcctgatgttctggaacttttttcaggtagtgtgcgttctcgatgcactggagctgtttttcggccctgcttatgggagctttctatgacactttctactcgaattgcgccgcaccttccttatctgcgccgctattcacgggcgttgaccggcacacagacatcaggcgacgcatatgtcgcagcagtgcttgaggcaatcattgccgacatatccattttccccgatacatcgaacgatcgcgtcgcactctacaaactgttcacggcgctgtttggttcctcgacggttcagattcccgagccctcctccccctatgcctgggagcagcgcgccaccatcaacctcggcaaggtctcgccgcgcgcccgccaggcattcatcctggcctcggtcgagaacttccgcgtcggcgagatcgccgaaatcctcgacagcgaggaaagcgaagtggccaacctgctcgacagcgcatcgcgcgagatttcccgccaggtcgcgaccgatatcatgatcatcgaggacgaaccgctgatcgccatggatatcgagcagatggtcgaaagcctcggccaccgcgtcaccggcatcgcccgcacccacacggaagccgtggcgctgtacaacaagaccaagccgagcatggttcttgccgacatccagcttgccgacggcagctcgggtatcgacgcggtcaacgacatcctaaagacctcgagcgtgccggtgatcttcatcaccgccttccccgagcgccttctcaccggcgagcgtcccgaaccgaccttcctcgtcaccaagccattcaaccctgacatggtcaaagctctgatcagccaggcgctattcttcaatgaaagcacgaaggcagccgcctgacgctatatttcagcaattgcggaacaatgcgaaatggggagcgttccagtccaactgaagcgctccccggatattaagattttatctagcgcttgcccctaaaaagaagcggtaggcgggctttcgggtccgctggcggcataaacggattgaaggaaaggcggctgggtgaagaggactggaccattggccggcgcgcccttcgcattggaaggcaaagagctgttgatggagcgggcgctcgccagcgcgggcatcgccgttgtctatcaggatcccgacctcggcatcgcctatgccgagaaccttcccgcgcatctcgaacatgccgttctgcccggtggcagcgatgccgacatgttcggcgaggtgcatggccgcaatctcgaaacattgaaacgcaaggtgctggaaagcggaacgccggcgagcaccgaagccgacatcgccatcgacggcgaaatgcgcacctacgagatcaaggtacagcgcgtcacgctcggccatgagatgggactgctgtctgttatcaccgagatcaccgagaccaggcaccgcgagaaggtgctgaaatcgcttctgcgtgaactctcgcaccgttcgaagaacctgctcgcgatcatccagggtatcgccacgcagaccgcccgcaacacactgtctctcgacagcttcctcgtgaagttccgcggccgtctgcagtcgctgtcgaactcccaggatctcatcaccgacagtagttggcgcggggccttcctcttcgaactcacccgcaagcagttcgccccctattggcccgagagcgccggccccctgcccgtcaccgggctcaatgttcacctgaccccgaatgccgcggtgcatgtcggccttgcgctgcacgaactgatcgtcaattccgcgaccttcggcgccattgccggcggtgcgcctgcgatcgcactcgactgtcaggaaaccatgcacggcgaccgcaaggcgatcagcttcagctggacggaaacactgcccaattccgacgaagtccacgagttcagcgagaataccttcggccgcatcgtgctcgagcgcgtcgtgccctcctcggtcaacggcaaggcggatctgcgcctgacgcccggccgcatcgagtatcatctgttgatccccgataccgaattcgagatcctcaagcgcgcgccgcagcaggtcggcggcgcctgaccgtcagcacctgacttttccatccatatccgtcgaaaacagcgcataagaaaacagccagtgcgagggcggcgcaccggctgttttcactcaccgggaggggaccgtgagtgtgatccgaaggtggtttgggggcgcgcatttttgggtcgatgcgatcaccattcggatatcgccataacgggctatacagggaatggttcccgcccttgccgaaaaatctcggattttttcgactattcttccgttcgagcgatcggcagcgccgccgacgatctattggcggcttcacgcccgccgatccgcccacgaaaaaccattgaaaatcagcatgatgcggcaagtgccaagcccaccctatgctaaaattttaccgtttgataaattttttatcctgagttacgcttccgtccactggccgtttacctataatgagggaacttcaatggaacgtctggacactgggattcatgctggccggctttcgcccgccgagtatgacaagaatttctccgatctgcatcctcgcctcgacaagcatgaggccctggtcgcctccgaccgctgttatttctgttatgacgcgccctgtatgacggcctgtcccaccgccatcgatatcccgctcttcatccggcagatatcgactggcaatccgctgggctccgccaagaccatcttcgaccagaacatcctgggcggcatgtgcgcccgcgtctgtcccaccgaagagctctgcgagcaggcctgcgtgcgcaacacggccgaggaacgccccgtcgagatcggccgcctgcagcgctacgccaccgatgcggcgatgcaggctggcaagcagtattacacccgcgccgcctcatcgggaaagacggtcgccgtcgtcggcgccggcccggccgggctcgccgccgcgcaccgtctcgccgtcaagggccatgaggtcgtgatctacgacgccaagccgaaatccggcggcctcaacgaatacggcatcgccacctacaaatccgtcgacggcttcgcgcaaaaggaagtcgactacgtgctctcgatcggcggcatcgagatcaggcacgggcagctgctcggccgcgacttccagctcgccgacctgcaacagcaatatgacgccgtcttcctcggcatcggcctctcgggcgtcaacgcgctgcgcgtcgagggcgaaagcctcgcgggcgtcgacgacgcggtcgatttcatcgccgcgctgcgccagaccgacaacaaggccgacatcgccatcggccgccgcgtgatcgtgctcggcggcggcatgaccgccatcgacgcggccgtgcaggccaagctgcttggcgccgaggaagtgaccatctgctaccgccgcggcaaggagcacatgaacgcatcggagttcgagcaggatctcgcgacctccaagggcgtcatcatccgccactggctggcgccgaaggcaatcctcgcgcaggacggcaaggtcgcggcccttgaggtcgaatacaccacgctgtcggaaggacgcctggcgaccaccggcgagaccggcgtcattgccgccgaccagatcttcaaggcgatcggccagaccctcgtctcgtccagccttggaagcctgcgtctggaatccggccgcatcgtcgtcgatgaacaaggccgcacctcgcttgacggcgtctgggccggcggcgactgcgtcttcgggggcaacgacctcaccgtctcggccgtcgccaatggccgcgacgccgccgaatccattcaccgcatgctggccgctgatgcgcagccggccgttgccgtcgcctgaaggggagagtgaaccatggctgatctccgcaacaatttcgtcggcatcaaatcgccgaaccccttctggctcgcctcggcgccaccgacagacaaggcctacaacgtcgagcgcgccttcaaggcgggctggggcggcgtggtctggaagacgctgggcgaggaaggcccgcccgtcgtcaacgtcaacggcccgcgctacggcgcgatctggggcgccgaccgccgcctgctcggtctgaacaacatcgaactgatcaccgaccgcgacctctacaccaacctgcgcgaaatgaagcaggtgaagatgaactggccggaccgcgcgctgatcgcctcgatcatggtcccctgcgaggaagagagctggaaggcgatcctgccgctggtggaagaaaccggcgccgacggcatcgagctcaacttcggctgtccgcacggcatgtccgagcgcggcatgggtgcggccgtcggccaggtgcccgaatatatcgagatggtggtgcgctggtgcaagcagtacacccgcatgcccgtcatcaccaagctgacgcccaatatcaccgacatcaggaagccggcccgcgcggccaaagccggcggcaccgacgccgtgtcgctgatcaacacgatcaactcgatcacctcggtcaatctcgacaccttctcgccggaaccctcgatcgacggacgcggcagccatggcggctattgcggcccggcggtcaagccgatcgcgctcaacatggtggccgagatcgcccgcgatccgcaaacccagggcctgccgatctcgggcatcggcggcgtcaccacctggcgcgacgcggccgagttcctggcgctcggcgccggcaacgtgcaggtctgcacggcggcgatgacctacggcttcaagatcgtccaggagatgatctcgggcctgtccgactggatggacgccaagggccaccgcaacctcgacgacattaccggccgcgccgtgcccaatgtctccgactggcagtatctgaacctcaactacatcgccaaggccaagatagaccaggacgcctgcatcaagtgcggccgctgccacatcgcctgcgaggacacctcgcatcaggcgatcacccagttcgtcgatggcgtcaggcacttcgaggtgatggaagacgaatgcgtcggctgcaacctctgcgtcaacgtctgtcccgtcgaaaactgcatcaccatggagcagctacccgcgggcagcctcgacgaacgcaccggcaagaccgtcgaccccaactacgccaactggacgacgcacccgaacaacccgatggcccggcaggctgcggagtaagcagctaccctgcggggtgtgagcgagcagagtcttctgccgcacagacgtgcggcggctggatccctgtgacgagcacagggatgagggagtttgtgggagcgcaacgccaatctccaccctcattcctgtccttgtgacaggaatccagccaccgcgcgtccgcgcggtgaatgacccaccttaagcttcggcgtcaccttgacccgcaaagccacaacccgaaaacaccttccgataagcccccgggctggttcccagccttcggcgaaaatgatgccgcatcgttgccggcgtgccgaagccgcaggcggtggcgatgtcgtcgagcgatgcctcgcccttccgctccaggagttcgcgggcatgccgcagccgctcggtgagcagccactcgccgacgctcgatcccgtcgttgcctcgaaacggcgctggaaggtgcgttggctcatccccgcctttgccgcgagcaagctgatcggctggtcctcatcaagccgcgcccgcatccattcgatgagcggcccgagccgcacgccttcgcgcggctgcggcacgggagtgcggatgaattgcgcctgcccgccctcgcggtgcggcggcacgacgaggcgccgggcgaccgaattggccgcctccgcgccgaaatcgccgcgcaccacatgcagacagagatcgatgccggcggcactgcccgccgccgtcagtattcgcccctcgtccatgtagagcacgtcggcatcgagcccgatctcgggatagcgctcggcgacggaggcgacataacgccagtgcgtcgtcgcccgcttgcccgcaagcaaccccgaggcggccagaaccgcaacacccgagcatagcgacatgatccgcgccccgcgcccatgcgccgcccgcaacgcctctatcagcccgtcgggcaccggcgcatcgatcgcccgccagccgggcacgacgatcagatcggcatcctcgagatcgtcgagaccgccatcgacggtgacgctcagcccaccggccgcacgaagcggtccggcttcgacgccacaggcgcgaaagcgataccagttcgaccccatctccggcctcggtaggccgaagacttcgtaggcgatgccgaattcgaacgtgcacaggccgtcatagacgagcacggcgaccttgggtcctgatagtgcggcagcatttggcatgatctttacgccagtcgtcattatggccagtttcgccaacacctatcatcgcgcatcctcgccggcaacagcaacgacaggagacaccaatgaccgacatgatccccgaacagcagcccgcaccccaccccacggcaccaagccacgtcgccgaaaccccggccgcggcacccgaggcgatcgcagcctactatgcccgcaagctcgccttcgagaccgattgctgggacgtccacgcctcgcttgcatcgggacgcaccgacttcgtcctcctcgacgtccgctctcccgccatgtttgccctgtcgcacgtgcccggcgcccagaacctgccgcatggcaagatgaccgcgcaccgtatgtctcagtggccatcggacacgctcttcgtcgtctattgcgccggcccgcattgcaacggcaccgacaaggcggcccttcgcctcgcaaggcttggataccgggtcaaggtgatgatcggcggcatgaccggttgggcggacgaaggcttcgatttcgaaaccgggtcggccaacgaaatcgcctaacgacgggcatatgcgccgaacggggagattgagttttccgcgccggcgcgcatagtcatcgcaggctggagaggtggcccgcatgacccgtcatatcgttgccatcggcccgctgccgccgccgcttcacggcttctccttcgccaccgcggcgatggtggaactcctcttggaagaccacaccgtggtcaccaccaacctctcgccaccggaaggcggttcccgcctctggcggcatccggcaaaggcaatcaaggtcttcgccgcgctcgccagtctcgcacgcgagcgcggacacccagacaaggcctgctacctcgcctgcgacggcggcttcggccaactctacacgcttttgctggtggccttcgcccggctcttcgcctacccgacctatctgcatcaccacagctttcgctatatcgaccggccgagcattgccatgcgcgccattctggcgctcgccgctcccgacctcacccatgtctttctctgcggcatgatgcgcgaccggttcaccgacacctatgacagacgcctgcacaccgccatcgtctcaaatgccgccttcgtacatccactaagcgagggcgtggcgatcccggtccgtccgctaacgatcggaatgctcagcaacctcagccgcgccaaggggctcgggacgtttctcgatttgctgcgccacgcgatcctgcagggcttgccgatccgcgccgtgcttgccggcccggtgacagataacgacgaccgcgccatgatcgacgcggcgctcaatgaattcgctggcacgctcgactatcgcggccgcgtgcttgatgacgacaaggcgaagttctaccgcgatatcgacgtcttcgtctttccgacgacctacgtcaacgaggcccagccgatcgtcgtcttcgaagccaaggcggcgggaagcgccgtcatcgcctatgatcgcggctgcatccacaaccagctcgatgagaccgacctcctcgtccccgccaatggcgcgttcacggagatcgccatcgcctggctgtcggaaatcccctccgacgaccggcgagagcagcgaagacgcgaggcaaggcagatgtacgagatcaggcagaaaaccgcgcgcaaacaggcgaagtccttgatgcagtgaaatttcctgcctcgcccgctggaaatctggatgacttgacgcatattttcaatcctgctcattagagatctgtctcgcgccccgaaccgaaaactggaaatcccacagcatgcccccttgcagcgcgcttcgcgcccacaccagcgattgccatgcagcggcagacgtccttccagttcgcctgatggccgacgtcaacccgtatgatcgggagcatggtccgtcgtgagcgagaattcgagcgagaatttcggccaggtcgacctcaccaattgcgaccgcgaacccatccaccgcctgggcgccatccagcctttcggcttcctgcttgtcgtctcctcggattggatggtggcacgcgcctccgccaacctcgagcagttcgtcggcatcgcctgcgatgagatcatcggccagcctgtctcgcgcgtgatcagcggcaagaccatgcacacgctgcgcaaccggctgagcatcatgcgcggccccgacgtggtcgagcgcctgttcggcatcgagctttccgaaggcggcccgcttttcgatatcgccatccacatgagcgacgatcaggtggtgatcgaggcagagccctcgcaggaaggcgcgcagggcggctcgccggtgtcgatccgcagcatgatgggccgtctcgaccaggccgagacgctggaggccttcttccgcgaaggcgcccgccaggcccgcgcgctcaccggcttcgaccgcgtcatggtctatcgcttcgatgaaagcggcgccggcgaagtggtggcggaagccgcccgtgccggcatcggctccttcctcggcctgcattacccggcctccgacattcccgtacaggcgcgcgcgctctacacccgcaatctcttccgcatcatcgccgacatcgacgccgtcaacgtgccgctggtgcccgaaatcgatgcgcatggacgctcgctcgatctctccatgtcgatcctgcgctcggtctcgcccatccacatcgagtatctgaagaacatgggcgtcggcgcctcgctgtcgatctcgatcgtcgtcgacggcaagctctggggcctgtttgcctgccatcactattccgcccgcctgccctcctttgagcggcgcacgacatcggagctgttcggccagatgttcgcctcaagattggagagccgcgagcggcggcttgcgctcgagttcgaaaccaaggctcgccagatcgccgaccggctgctgacctcggtcgccgacaatgccagcctgctcgacgacccctcctggctgatcgacgcgctggccgacgcgatcccagccgatggcatcggcgtctggatcaacggccgctcggcgctgaacggcatcaccccgtcgcaggccgaattcggcgagctcgtccgcgtcctcaaccgcaactcggccggccgcgtgttttcgaccgacagcatcgcagagacttggccggggacgatatcaggcgacatcgtggccgggctgatcgccattccgatctcgcgctcgccgcgtgactacgtggtcctgttccgccaggagatcgtgcgctccgtgcgctgggcgggcgatccgcacaaacccgtggaatacggcccgaacggcccgcgcctgacgccgcgcaagagcttcgagacctggtccgagctggtgcgccagcactcgcagcccttctccgccgccgaacgccgcgtcgccgaaaccattcgcgtcacgctgatcgaggtcgtgctgcggctgacggatgaagcgaacgcggtgcgccagcaggccaacgaacggcaggaactgctgatcgccgagctgaaccaccgtgtgcgcaacatattgagcctgatcagcggcctgatccgccagtcacgcggcacgaccgacagcaccgacgagttcatcggccatctcgagggccgtgtgcaggcgctgtcgcgcgcgcacgaccagatcacccgcgaccactgggcgccggcaccgctgcgcgcgctgctgcaggccgaagccgccgcctatctcggcccgaatgccgcgcgcatcatcatgaacgggccggaagtgctgctggcgccacaggccttttccatctccgctctggtgttccacgaactggtgaccaacagcgccaaatacggcagcctctgcgacagcggcaccgtcggggtcgattggcacaaggacgacagcggcaatctcgtcatccactggcgcgagagcgacggcccgcccgtcaggcagccgacccgccagggcttcggcacgacgatcatccgccgctcgatcccttatgaactcggcggcaaggccgatgtgcgctatgagcctgaaggcctagaggcgcatttcctgatccccgagaagttcgtgaccttcgccgaaggcgcggtgtcgctgctgccggaacaatcgctgcaatcggccaaggccattctggagacgatcaaggaccggccgctcgacgggctcgacatcctgctcgtcgaggacaacctcatcattgcgatggatggagaggacatcttcctgcaactcggcgcacatagcgtgtcgcttgcgccgaatgtctcgaacgccctggccgtcattgacagccgcaaattcgacctggccgttctggatgtccatctcggcgaggaaacgagcatcgccgtggccgaaaggctggcggccaagggagtgccgctgatcctggcgacgggctatggcgagggagtatcgcaggcctatggcgccctcggcgccaatctgctgcagaagccctacacgatcgaaagcgtcgccggcgccctgtcgcgcatcacgctgatcgcaaagtcatgacacgggctgtttcgcccgcacgctgagaccatcgacgaagagctgctcgagaaaccgcgccgcgtcctcgaaccgtccctcgccggagtgtccctgcccgagcacggcgcgcacctgcacgtcgaagtcggcgtaatgctgcgtcgtcgaccagatcgagaagatcaggtggtagggatcgcacttgacgatcttgccggccttggcccaggcgcggatgacacgggccttttcgtcgaccagttccttcagcggccctttcaattcgtcctcgatatgcggcgcgccctgcagcacctcatttgcgaacaggcggctctcgcggggaaaatcccgcgccatctccagcttgcggcggatatagccgcggatctcgctctcgggattcccctccgcgttgaaggcgcgcaacggctcgagccacgtgaacaggacgcggtcgatcagcgcccggtgcatcgcttccttggtgcggaaataatagagcagattgggcttcgacatgcccgccacttcggcgatctggtcgatcgtcgagccacggaaaccgctgaccgaaaacacatcgagcgccgcttccaggatctgttcctctttctcttcctggatgcgggtgcgccgctgtgtcctcgcagctctcggtatcgccatgtcgttattttttctcgttcaaattcaactatttcagtcaagtttaactgactgcgatccgctgccgaaaaaccgggcatctgccctgaattttgtcggtaattttcctgattttcgccttgagcccgacgccggaagttgtaatgtttaccagtcggtcaaattatccgtcagaagcaaatcaaaggcaactgacgattttcagacgctaacaaaacaacaacggcgctgaaactgaccacgggaacaagcggacatgctgaatagcatgcgccgcataaaaactggtgaggaatacggatatggtggcagcaccaggcgagaacatgcgcgtcaacggggaccgtctctgggacagtctcatggacatggcgaagatcggcccggggattgcgggcggcaacaaccgccagacgctgaccgacgccgatgccgagggccgcagcctcttcaagacatggtgcgacgccgctggcatgaccatgggcgtcgacaggatgggcacgatgttcgcgacccgccccggcaccgatcccgacgcgctccccgtctatgtcggctcgcatctggatacacagccgaccggcggcaagtatgacggcgtgctcggtgtgctcgccgcgctcgaggtcgtgcgcacgatgaacgagatgggcatcaagacgaagcaccccatcgtcgtcaccaactgggcgaacgaggaaggcgcccgcttcgcccccgccatgctcgcctccggcgtcttctccggcgtccacgacatcgactacgcctattcccgcaaggaccccgagggcaagacctatggcgacgagctgaagcgcatcggctggctcggcgacgaagcggtcggtgcccgcaagatgcacgcctatttcgaatatcacatcgagcagggaccgatcctcgaagccgaaaacaagcagattggcgtcgtcacccactgccagggcctatggtggctggaattcacgctgaccggccgcgaggcccacaccggctccaccccgatgaacctgcgcgtcaatgcaggccttgccatgtcgcgcatcatggaaatggtgcagggcgtggcgatgggcgaacagccgggcgccgtcggcggcgtcggccaggtcttcttctcgccgaactcccgcaacgtgcttcccggcaaggtggtcttcaccgtcgacatccgcacccccgaccaggccaagctcgaccgcatgcgcgccaagatcgaggccgatgccgtgaaaatctgcgaaacgcttggcgtcggctgctctgtcgaggccgtcggccatttcgacccagtcaccttcgatcccaagctggtggacgccgtccgcaacgccgctgaccgtctcggctacagccacatgaacatcatctccggcgccggccacgacgcctgctgggccgccaaggtggcgccatcaaccatggtcatgtgcccctgcgtcggcggtctcagccacaacgaggccgaggagatctccaaggaatgggccacagccggcgcggacgttctgttccacgcggtggtggagacggcggagattgtggcgtgatgtcaaacctcgcgcccggagccccctcatccgacccttcgggccaccttctccccgctggggagaagggaagtgaggcgactgcggcgtgttcccccttctcccctcggggagaaggtgcccgaagggcggatgagggggctccgggcgcgacgaaaattatccgaccggatatccgcaaacaccgcccggccaaaacaacacaagcgcggcagcttcgccaaaatgaaaccgaggaggagtaccacctctggagcgacctacgcgcccgccggctggatggctacaagttcgcaaggcaagttccgctcggcccgtttatcgtcgatttcctctgccgcgaagcccggctggtcgttgaaatcgatggcttccagcatgccgaaagcgctgccgatcaaagccgaaccgtgtggctcaataacaatggctactccgtcctgcgcttctggaatcacgaaatctcgcgcgaaagacgctcggttctcgaaaccatcctggccgcgttgcagggccggattgaattcaacgccgaacgaccgagcttctattcgcctgctgaaaaacgataaaaacagggaacccgaccaatgagcacagtcatcaagaacggcaccatcgttaccgccgacctgacctacaaggcggacgtgaaggtcgatggcggcaggatcgtcgagatcggacccaacctctctggaaccgaaacgcttgacgccaccggctgctacatcatgcccggcggcatcgatccgcacactcatctcgaaatgcccttcatgggcacctattcctccgacgatttcgacagcggcacgcgcgcggcccttgccggcggcaccacgatggtggtcgacttcgcccttcccgcccccggccagtcgctgctcgaagcgcttaccatgtgggacaacaagtccacccgcgccaattgcgactattccttccacatggcgatcacctggtggagcgagcaggtcttcaacgagatgaagacgatcgttcaggacaagggcatcaacaccttcaagcacttcatggcctacaagggctcgctgatggtgaacgacgacgagatgttcgcttccttccagcgctgcgccgagcttggcgcgctgccgttggtccacgccgaaaacggcgacgtcgtcgcctccatgtcggcgaagctgctcgccgaaggcaacaacggccccgaggcccacgcctattcccgcccggccgaagtcgagggcgaggccaccaaccgcgccatcatgatcgccgatatggccggctgcccggtctatatcgtccacacctcctgcgaacaggcccacgaggccatccgccgcgcccgccagaagggcatccgcgcctatggcgagccgctgatccagcacctgacgctcgacgagaccgaatatttcgacaaggactgggaccacgccgcccgccgcgtcatgtcgccccccttccgcaacaagcagcaccaggacagtctctgggccggcctcgcctccggctcgctgcaggtcgtcgccaccgatcactgcgccttcaccaccgaccagaagcgttacggcgtcggtgatttcaccaagatcccgaacggtaccggcggcctgcaggaccgcatgccgatgctctggacctacggcgtcaacaccggccgcctgacgatgaacgaattcgtcgccgtcacctcgacgaacatcgccaagatcctcaacatctacccccgcaagggcgccatcctcgtcggcgccgatgccgacctcgtggtctgggacccgaagcgctccaagacgatttcggccaagacccagcaatccgcgatcgattacaacgtcttcgagggcaagcaggtcaccggcctgccgcgctacacgctgagccgcggcgttgtcgtcgtcgaggaagagacgatgaagacccgcgagggccacggcgagttcgtcaagcgcgaaccggtcaccgccgtttcgaaggcgctctcgacctggaaggaaatcaccgcgccgcgcaaggtcgagcgcgcgggtattccggcgagcggggtgtgatcgatggcgcgcggcaggctgtctctgacaatcgtttcactggccgcgctgacctccgcggcaagcgccggcaccttgccgatcaagggcagctacggcaacaaggacggatgcgcctatgccaagtctggcgaatccaccgggtcggaaaatttcttcctgctgacatcggaagccatcaccacggcggcctccgcctgcaccatcgagaaagtgctgaagaccgagggcaagaacttcaccgccaaggtttcctgcgaggccgaaggcgaagaagcggcaagcgaggacacggcaaagatcacctatggcccgaagggctatacgatcggcttcacgtcggatgccggcataaagtggggaccgctgccactatgcaagtgacatcacaccggcacgttcccatccagctccggcaacagcacgacgctctcctgctcgttgggatcggtgcgcgcgatgatcgccgtgcagggcgtgctgctgagattggccggcaggtgcggcacgccggcggggatgtagaacagctcaccggcatgcacgacgacatggtgctcaagatggtcgccgtaccaggtgtgcgcctcgcccgacagcatgtagatcgccgtctcgtgcgcctcgtgcagatgcgccttggcgcgcacgccgggcgggatggtgagaagatgcatgcagatgcccttggcgccgaccgtctcggcggcaatgccctggaaatagctcagcccctgctttccgtcgtaggaatggtcggggcgcacgatatggcaggtcggttttgatgtcgcatccatcgtcgtcttcctcaaatcttgccggcgcggcaaaggccgccgccgatgatatcacgcaaaccgccgccgcgcggggaaaacaggatcgatccgcattgacgcaagcagcctccgtcgtatccgcaaaaaacctctgcctgacctaccaggccaatgacgcgccggtgcacgcgctgagcaacgtcgacctcgatgtccgcaagggtgacttcgtctccttcatcggcccatccggctgcggcaagaccaccttcctgcgggtcatcgccgatctcgagaagaagacctcgggcgacatatcggtcaacggcatgacgccggaagaggcccgcaaggcccgtgcctacggctatgtcttccaggcgccggcgctttacccctggcgcacgatcgacaagaacatcgcgctgccgctcgagatcatgaactacccggccgatgagcgacagaagcgcatcgccgaggcgctcgatctcgtcggcctgaccggcttcgagaagaagttcccctggcaactgtccggcggcatgcagcagcgcgcctcgatcgcccgcgcgctggccttcgacgccgatctgcttctgatggacgagcccttcggcgcgctggacgagatcgtccgcgaccatttgaacgaggaactgctgaagctctgggcgcgcaccaacaagaccatctgcttcgtcacccactcgatccccgaggcggtctatctctcgaccaagatcgtcgtcatgtccccccgccccggccgcgtcaccgacatcatcgactcgccactcccccgcgaacggccgctcgacatccgcgagaccccggagttcctcgaaatcgcccaccgcgtgcgggatgggctgagagcggggcatagctatgagcattgaaggtcggcgttctgtggccgcccccctctgtcctgccggacatctcccccacaaggggggagatcgacccgcggagaggtcttcgccaagctatgagataggagcgagcgggctagcccagccaatctccccacctgtgggggagatgtccggcaggacagaggggggtaatccacggcaaaccctcgccaatgcgaggcacaccgcatgacacccgacaccctcaaggacaagatcatccccgtcaccaccatcctggctgcgctcgtcgccatctggtacgtggcggcgatcctgatgaacgccccgttccagcgcgacatggacacccgcgccggccagtctccaacgacgatggagtttatcggcaagacgttgtcgcagcccaagcccctcctccccgcgccgcatcaggtcgcccgcaacgtcttcgacaacactttcctgcgcaagctctccagcaaccgcagcctcgtctatcactcgggcgtcaccctctcctccaccgtgctcggcttcacgctcggcacgctgctaggcatcctgatcgccgtcggcatcgttcacatcaaggcgctcgaccgcagcctgatgccgtggatcatcacctcgcagaccatcccgatcctggcgatcgcgccgatggtgatcgtcgtgttgggtgccatcaacatcaccggcctgatccccaaggcgctgatctcgacctatctctccttcttcccggtcactgtcggcatggtgaagggtctgcgctcgccagacgtcatgctgctcgacctgatgcgcacctataatgcatcacccgcccagaccttctggaaactgcgcgtgccggcctccgtgccctatctcttcacctcgatgaaggtggcgatcgccgccagcctcgtcggcgccatcgtcggcgagttgccgacaggtgcggtcgccggcatcggttccaagctgctcgccggctcctattacagccagaccatcgacatctgggcggcgctgatcgccggttcgctgctggctgcactgctcatcatgatcgtcagcatcgccgcgaaaatcgtcgacaaggccatgggtgggagatcagcatgaagagcgcgtcctggcaggcgatcgtcgccctcctcctcaccgtcgccgccgcggcaaccctgccgctgttcccggccgcctcgggtcgagtgccatcgtcaggcatgacggcgatcctcttcattctgatcgccgcctcggcactcatctccctgctgccgcaatcgaagaccagccgcgcgacggtgctctttatcggcgcccatggcggcgcctggctgctgctgtcgagccttgcgggcaatgaaggcttcgccgcgaaacccttcttcctcctgatggcggcctgctggctgctcgcctggcgcaccgtcagcgagatcgtcgagatcaagacaagctcgcgcgccgacgataccgcgctgcggctcctggtgcccgccatcttcggcgcctggatcctgatcctgtgggaaaccgccacgcgcggcgccggcattcccttcgtgctcctgcccccgccgagcgccattgccgcccgcatcgtcggatcgctgccgatccttcgcgacgacgtcaggcagacgatcttcaaggccgtgctcgccggatatgtcatcggctgcggcgccggcttcgccgtcgccattctcgccgaccgcgtcgccttcctgcgccgtggcctgctgccgatcggcaatatggtctcggcgctgccgatgatcggcgtcgccccgatcatggtcatgtggttcggcttcgactggcagtccaaggccgccgtcgtcgtcatcatgaccttcttccccatgctggtgaacaccgtcgccggccttgccgcatccggtccgatggagcgcgacctgatgcaaacctatgcctccagctactggcagacgcttctgaagctccgtcttccggcggcaatgcctttcattttcaatgcattgaagatcaactcgacgctggcgctgatcggtgccatcgtcgcggagttcttcggtacgccgatcgtcggcatgggctttcgcatctccaccgagatcgggcgcatgaatgtcgacatggtctgggccgaaatcgccgtcgcggcgctggcaggctcgatcttctatggcgtcgtcgccctcgctgagcgggcggtgacgttctggcatccgtctatccgtggtggctaggcgtcgcgcgtgtccgcgaatgggctcgggcataacaatagagggaacaagaaaatgaaaaaactggttcttgcaatgatggcgagcgcgatggcgatggcggcaggccacgcgatggccgccgacaaggtgacgcttcagctgaaatgggtgacccagtcgcagttcgccggctactacgtcgccaaggaaaagggctactacgaggaagaaggcctcgacgtcgacatcaagcctggtggtcccgatatcgcgcccgagcaggtgattgccggcggcggcgccgacgtgatcgtcgactggatgggcggcgctctggtcgcccgcgaaaagggcgttccgctcgtcaacatcgcccagcctttccagaagtcgggcatggagctgatctgccgcaaggacggcccggtcaagaccgaagccgatttcaagggccgcacgctcggcgtctggttcttcggcaacgagtatccgttcttcgcctggatgaacaagatcggcctgaagaccgatggcggtccggatggcgtcacggtgctgaagcagagcttcgacgtccagccgctcctgcagaagcaggccgactgcatctccgtcatgacctataatgaatactggcaggcgatcgatgccggcttcaagcccgaggaactgaccgtcttcaactacaccgccatgggcaacgacctgctcgaggacggcctctacgccaacgaggagaagctgaaggacccggccttcaaggaaaagatggccaagttcgtcagggcttcgatgaagggttggaagtatgccgtcgaaaaccccgacgatgcggcggggatcgtcgtcgacgccggcggccaggacgaaaaccaccagaagcgcatgatgagcgaagtggccaagctgatcggcgacggatcgggcaagctcgacaccacgctctacgaccgcaccgccaaggcgctgctggaccagaagatcatcagcaagcagccctcgggcgcctggacgcaggacatcaccgacgcggccgccaagtaggacgcggcgcgcaggtcgtatcacgcgaacagggaacgcgcgggctggcaccgcgcgttccttgtttgatcataaaaatttcgcggcgatgtcgcatcggacccgcctcgcacgtcataggaaagacggaattacggatcaccaaaccgaatgccgacatcaccggatggtgattgatctcggccgtcgagattactattgtgcgccgcgaggaattattttccaccgggcttgtgcgtggggcaaaacgataccacctacaagtcggattcgccggacgagggttatcttacggtagtaagagatggcgatgatgtgggaatatttctgagcttacatatacgggaaaaggccttcgcgagctgcagacatggcgcgagtttggccaacctcttcaaggactggaccaagacgcatggtacgcatgacgcctaaaactctacgcgcatccaccctgatcgtggctgcctttgccgcatcggccgcctttgcgcaggaaaaccagcccccgaaggctcagcagaacctgcccgtgatcgtcgtcacgaccgctaccacgcgcgcgctggtcgatcgcgtcatcggcaccggcacgatccgccccgtggaggaagtctatatccagccgcaggtcgagggtctctccatccgttccctcaatgtcgatatcggcgacaaggtcgaggccaacagtacgctggcgacgctgaacgaggatgcgctggcgctgcagaaggcgcagatgatggcgaccaaggccaagggtgaagcgagcctcgcgcagcttcgcgcccagctcgtggaagccaaggcgacggccgagcaggcccgcctgcagcaggcacggtcggccgagatgggcaagaagggcaccgtgtccaccgcccaggtcgagcaggccgatgccgccgccgccaccgccaacgcccgcgtcagctccgcccagcaggcgatcgaagtcgccgtcgccgatctcaaggtcgtcgacagccagatcgccgacgccgatctgaagctggcgcgcacggacgtcaagacgccggtgtcaggcgtgatctcggccaagaacgcccgcatcggcgccatcgccgctggaaccggcgagccgatgttcaccgtcatcaaggacaatgcgatcgaactggtcgccgaattgtcggaaaccgatatccagaagatcaaggtcggccagcgcgccaacgtgacgttgtcgggcagccgcacgacgatcgaaggcaaggtcaggatcgtctccccgacggtcgaccagtccacccgcctcggcctcgtgcatatcttcatcaccgatgagagtgctgctcgctccggcatgtatgccagcgccgacatcatcgtcgccgaaaagagcgacattgccctgccgctgtcggcggtcaccacgggccgcgacggctccaccgcccgaaaggtcgaggacggcgtggtcaagcaggtgaaggtgacaacaggcattcaggatggcggcttcgtcgagatctcggaaggcctgaaggacggcgacaccgtcgtcgccaaggccggcgccttcgttcgcgacggcgacaagatcacacctgtcaccgaagccgtatcggcgcaatcgaactgaccgaggccactccatgaatttctccgcatggtcgatccgaaatccgattgcgccgctgctcgccttcgcgctgctgctgttcgtgggcatccaggccttctacaagctgccgatcacccgcttcccgaatatcgacgttcctgttgtctcgatcagcgtcgcgcagagcggcgcctcgccggccgagctcgaaatgcaggtgacgaaggaagtcgaggacgcggtcgcctcgatcagcggcatcgatgaaattcagtcgaccgtcaccgatggcctgtcgcagacggtcgtcgtcttccgcatcgagaagccgaccgccgaagccgttcaggacaccaaggacgcgatcgacaagatccgcagcgatcttcccgccggcatcgaggtgcctgtggtcagcaaggtcgatgtcgagggacaggcgatccagacattcgccgtctcctctcccaacatgacgctcgaggagctgtcctggttcgtcgacgacaccatcaagcgggcgctgcagggccagcccggcatcggccgtatcgaccgctacggcggtgccgaccgcgaagtgcgcgtatcgctcgatccgggcaagctcgatgcctacggcatcaccgccgccgacgtgaaccagcagctgcgcggcaccaacgtcaacctcggctccggccgcggccaggtcgccggcaacgagcagaccatccgtacgcttggggacacgcgcgacgtctcgcagctcaacaccaccaccatcagcctgcccaacggccgcttcgtgaagctctccgagctcggcacgatcgacgacaccttcgaggaacagaagtccttctcgcgcttcaacggcacgccgtcggtcaccttctcggtgttccgcgccaagggcgccagcgaagtctcggtcgccgaaaccgtgtccgaaagcctgacggagatccgcaaggccaatccgaacgtcaagatcgagatggtggacgacagcgtctacttcacctacggcaactacgaggcggcgctgagcacgctggtggaaggctcgatcctcgccgtcatcgtcgtcttcctgttcctgcgcaactggcgcgcgacgctgatcgccgccgtcgccctgccgctgtcggccatcccgaccttctggatcatggatctgatggggttctcgctgaacctcgtgagcttcctggcgctgacgctggccacgggcattctcgtcgacgacgccatcgtcgagatcgagaacatcgcccgccacatcaagatgggcaagacgccatacagggcctccctggaagccgccgacgaaatcggtctcgccgttatcgccaccagcttcacgatcatcgccgtcttcgtgccggtgtcgttcatgcccggcatcgccggccagtatttcatccagttcggcctgacggtcgccttctcggtgttcttctcgctcgtcgtggcgcgtctcatcacgccgctgatggccgcctatctgatgcgcgccgaagacggcatggaagatcatcaggacaatgacggttggatcatgcgcggctatacccgcctggtcaccggcacgacgcgcaagtggtactggcgctatacgacgctgctggccgccatcgtcttcctggtcggctcggtggtgctgttgagccgcgtgcccggcagcttcatgccgccggacgattcctcgcgcgtcgtcctgtcggtggaactgccgccgaacgcgacgctggaggatacggccgccgcatcgaccaaggtctacgacgccgtgcgtggcatcgacggcgtggaaagcgtcttcgttctcggcggcgcctcccccaagggcgatctcgaactacgccgcgccaccgtgcgcatcatcctcggcaatatcgatcactcgctgctgaagaccctggtcaacaagggtctcggcgggctgcccgtcatcggcggcctcatgccgaagatcgacgatcgtggccgcacgcgtccgcaatgggatgtcgagaaggacatcttcgcggccgtccgcgacatccccgacgtgcgcatctccaaggtaaacgaccgcgccgagcgcgacctcaccttcaacttcctctccaccaacgaggcagatctgaacgaggccgtcagcctgctggaatcgaagctgcgcgcttcgccgatcctggccaacgtctcctccgaaggtgccctgccccgcccggaactgcagatccgcccgcgcatggccgaagcctcccgcctcggcatcaccccgcagcagatctccgagacggtccgcgtcgccaccatcggcgatatcgacgccaacctcgccaagatctcgctcgacgaccggcagatcccgatccgcgtgcaggcctcgctcgatgtccgccgcgatctggccgccatccgcgccatcaagatcaagacggcgagcggcgccagcgttccgctctacagcgtcgccgatgtcgactattcggaaggcccgagctcgatcaagcgcaacgaccgcaaccgcgtcgtcgccatcggctccgacgtgccgttcggcacggcactggatacgtccaccgccgagttcaagcgtatcgtcgcgcaaaccgaattgccgaagagcgtgaagctggccgaaagcggcgacgccaaggttcagggcgagatggtccagagtttcggcaacgccatgctgatgggcctgttgctggttctggtggtactcatcctgctcttcaaggatgtgatccagcccttcactatcctgttctcgctgccgctcgccatcggcggcgtggcggtggcgctgatcgtcacccagaacgcgctctccatgccggttctgatcggcatcctgatgctgatgggtatcgtcaccaagaacgccatcctgctcgtcgatttcgcgatcgagatgaagcggcatggcatggaacgtgtcgaagccatggtggaggccggccgcaagcgcgcccgcccgatcatcatgacctcgatcgccatgtcggcgggcatgcttccctcggcgctcggcgtcggcgaaggcggctcgttccgcgcgccgatggcgatcgccgtgatcggcggtatcatcgtctcgacggtgctctcgctcgtcgtcgtcccctccttcttcctgatcatggacgacctctcccgcctgctcggctggctcttcggccgcctggtcggcaagaaggacgaggagcagctgccgctctcgcccgaggagctcacgaccgccgtcaccaacctcgacggccgtgtcaccgcgatcgagaagcccgacgacaggaagggcaaatccggcggcaacgtcgtccgcctaccgcccttcgcggcggagtaaccggatcatacggaaaagccggggttcgccccggcttttccgtttcttgctcgcacttgatacagatcaactttccccatggtcattccggctattttacgcctatggcaggcgcggcctgcgaccgacgaagtggagaaagagatgacgacgggcttgaagccgagcaatgtccacaaggccatgcttggtgagaccattcttttttccggcctcaaccgggatgaacgcaacgcgcttctcgcctgcgcgaccatcgtgcgctaccagatgcacgacatgctgtttcatcagggcgaacggggcgagtatttctattgcgtgctgacgggcttcgcccggctttatcgcctcggcgacgacaaccaggaaggcgatatccgcatctgcgagcccggcgacagcttcgccgaatgcctcgtcacagacggcggcgattatcgctacgccgcccaggccatggaacactcgatcttcgcccgcttcaatctcgaacaggtccgcgcgctgctcgaccatcggccgcatatcggcatggcgatcatgcgcagcctctcgcggcacctgctatcgaccatcgattgcctggcgagcgaccgcatgcagaccgcgccgcagcgcgtcgcgacctaccttctcacgcattgcaaacaggaaggcttggcggcgaagatgcggctccccttccagaagagccttttggcgcgaaagctcgggctggcgcccgaagcactctcccgcgccttctcgtcgctgcgcgccgccggcgttaccgtcagcggccgctcgatcgagatcagcaatctcaacgtcctgaagacgatcccggcgattacaagccgccatgcaccttgaggaagtcgacgatcgcgccgatgccgtcgccgcgcttcatgtccgagaacacgaaggggcgcgtgtcgcgcatgcgcgtcgcgtcccggtccatcacgtcgagatcggcgccgacataaggcgcgaggtccttcttgttgatgacgagaaggtccgacttggtgatgccaggcccgcccttgcgcgggatttcctcgccctggcagaccgagatcacgtagatggtgatatccgccagatcaggcgaaaaggtcgccgcgagattgtcgccgcccgattcgatgaagaccacgtcgagatcgggaatgcgctcgttgaggccggcaatggcctgcaggttgatcgtggcgtcctcgcgaatggcggtgtgcgggcagccgcccgtttccacgccgacgatgcgctccgatggcagcgcctgcatgcgcatcagcgcttcggcatcctcggtcgtgtagatgtcgttggtgacgacggcgaccgaatattggtcgcgcatcgccttgcagagtttttccgtcagcgctgtcttccccgagccgaccggtccaccgatgccgacccgcaggggtccgtttcctgatttcatatcgtgcactccaatcgagaataatcatagcgcgtcaaccgcaaggcggccaccggcaaatggcgcagatcgttagcgacaagcgctgtcgtcacgatcggaaaagccgcgtcgattgcgtctcgtgccgtagcgaaacgatatcggcctgcaccgtcgcagatcccaactcatcgagcgtcgagcccgccgcccgccgcgcaagcagcgcgatatccccttcccgcgccgccaggatcgcgacgccgtccttctggccggcaacgccgagccggatgccggcggaaacggcctgcgagacataggcgtgcaggaaggcggcaaccgccttttcggcactgatcccatgagcaccggaaacagcgccgacggcaacaggataagccacatgttttggcaaccgtatgaacacatcatcgggccatgcggcagcggccgacaggaaagcgtcgccgagcagaatggtctcctgatgccgctcgcgcgatcccgccagcgcctcggcaagctcggccacgtcggatagcgccgaggcgtcgccatgcactttatggctccaggcaagcagcacggcgtcattccacactgcgccgtggtccatcatggcgccgagccaatcttcaagcgaggcggcatcgtgcacgagcccgtcatgcacagcccgctccagcccgcccgaataggcgaacgagcccaccggaaaggccggcgaaagccacgccatcaaccgcagcaaagcctgcagatcaccgtcttcggtcatggctcagtcgtgcgaatgcttgtgaccgtggtcatgtccatggtcatgcccgtggtcatgtccgtgatcgtggccatgatcatgcgcatgtccatgcgaatggctgccgtgggagtgataggcgccgcgcgccggctggaacggctcggtgacatcagagaccgtcgcgcccagtccctcgagcatggcgcggatgacatggtcgcgcaggatgaggatacgctcctcctcgatctgcgcgcccagatgccggttgcccagatgccaggcgagctcgatcagatgcaggcgatcccgggccttgatctcgaacagcttctcgtcggcggcgacgatctcgaccagctcgccgtcgccgagcaccagcatgtcgccattggcgaacagcaccggctccttgagatcgagcatgaccatctcgccattgtcgagatgcagcagcttgcgcctcagatgcctgaggtcatgcggcagcacgaccttgtggctgggatgcgaagacggcgtgccggccggcagataggtggtgatatactgcatgatgtgtccattccggttcaggcgaggagcatgcaaaatcgcccttgatggcgcaagggtcaaaacgacgtaggaagcaacatcagcgcccgcgacggccgctgctaatggatggcggcggatctgctgtcgacgttgatctcgtcctggctcagccgcgcgcgacgctgcagtccctcgtcctcgtggaccacgcgattgcggccgagggtcttcgccagatagagcgccttgtcggcggcggtgtaggccgcctgcgtgcttcgcccgtcgcagagttccgcgatgccggccgacacggtgatgttgaaggtgcagccatcgagcgcgatcgtccgttcggcaagccggttgcaggccgctctgatccgcgccacccgctcctctttcagcggcgcgacgaccaccacgccgaactcctcgccgccgagccgcgcaacggtcgagtcttcgctgaaggccgccgacagctccgccgcgacggcgacgatgacagcgtcgccacaggcatgcccatagcgatcgttgaccgccttgaagcgatcgacgtcgaagatcgccaggcaggcaggccccgcgacgtgatcgagcgcctcggtgaacgcccaccggttgagcaggccggacagcatgtcggtgcggctcaattgctcgaactcggcgcgcgagacgctgagttgatgcatggcgtagcccgcgacgagggccaacaccccggacacgatccccccgatcagccaggacagcgcaacgccgtagatgatggcgttctccagcgaaaccggcagcacccccgcccagtcgagcggaaagagcaacaccgctatcgccaccgatgagagcatcaccgcggcaaagctcatcttcagcgcataggtatagatcgtgacgcgattcctgaaatcgccgagctccgcctggagtaagatatgcatccgaatcgacctttttgcccctcgcaaggcatattgattagataggaaccgctgccgaggtcttaagggaatcgttaggatttgagggaattttgtaaattaatcgtgcgctgcacaatggatcgaaacgcgacgattttcagcgtgaacaggcctgcggactgtctcgcataaataattgataaaaaacattttttaggatttcttcgggcgccacgtctcatttcggtcgcaacgccccaaggtggaacagagcgcaatcaagacacaactttaagaatgtattgctaaacgtgtagcgagaagttggccggcacccgaggcgccggccattaaagctcgtcagtacaggaagtagcgctgcgccatcggcagcgaagtggccggttcgcaggtcagcaactcgccgtcggcacgcacttcgtaggtctccggatcgacctctatatgaggcgtgaggctgttgtggatcatcgacgccttggagatgccgccgcgcgtgttcttgatggcgacgaggtccttggcgacgccgagacgccccttcaggccggcatcgagcgaggcctgcgaaacgaaggtgaccgacgaattggtgcgcagcttgccataggcggcgaacatcgggcggtagtgcatcggctgcggcgtcgggatcgaggcgttcggatcgcccatgggggctgccgcgatcgagccggcgagcagcaccatctccggcttcacgccgaagaaggccgggttccacaagacgaggtccgcgcgcttgccgacttcgatcgagccgatctcgtggcttaccccttgagcaatcgccgggttgatcgtgtacttggcgatatagcggcggacgcggaagttgtcgttatcacccgtctcctccttcagcggaccgcgctggcgcttcatcttgtcggccgtctgccaggtgcggatcgcgacctcgccgacgcggcccatggcctggctgtcggaggagatgatcgagaaagcgccgatatcgtggaggatgtcttccgccgcgatcgtctccttgcggatacggctttcggcgaatgcgatatcctccgggatcgacggcgacaggtggtggcagaccatcagcatgtcgagatgctcggcgatggtgttgaccgtgtagggccttgtcgggttggtggacgacggaatgacgttcgactggccgcagatcttgatgatatcgggcgcgtggccgccgcccgccccttccgtgtggaaggcgtggatggtgcggcccttcagcgccccgatcgtatcctccacgaagccgctttcgttcagcgtgtcggtgtggatcatcacctggatatcgtattcgtcggcaaccgagaggcagcagtcgatcgcggccggcgtcgtgccccagtcctcgtgcagcttcagcgatgacgcgccggccagcaccatttcctcgagcgcggccggcagcgaggcgttgcccttgcccgccaacgccaggttcatcgggaagccgtcgaagctttcgatcatccgctcgatatgccaggcgccggtgcaggtggtggcgagcgtgccgtgcgccgggccgctgccgccgccgagcatgcaggtgatgccggacatcagcgcttcctcgatctgctgcgggcagatgtagtggatatgcgcgtccatgccgccggcggtgatgatcttgccctcgccggcgatcgcctcggtggacgggccgacgatgatgttgacgccaggctgcgtatccggattgccggccttgccgatggcgtggatgcggccgttcttcagcccgatatccgccttgacgatgccggtatggtcgatgatcacgacattggtgatgacggtatcgacagcaccctgcgcccgcgttgcctggctctgccccatgccgtcgcgaatgaccttgccgccgccgaacttcacctcttcgccataggtggtgaaatccttttcgatctcgatgaagagctcggtatcggcaagccgcaccttgtcgccggtggtcgggccgaacatgccggcataggcggcgcgggaaatcttgtagggcatgggtcaggctccttgggagggcgaacgggatgcggacggataaaaccgcgtgacgcggcctgcggcgacgtaagcgtcgacgagctgcctttcggcggcgaagggatgccactcccagccttggtggccgaagccggcaagcgcaatcggggcgtcgggaaatcggttcatgacctccgcgatcacgatcatgccgctgctcggcacgacgtagggcgcgggatcaaatacggccagagcctggtcgacgccatcatgaatcactttgtcaacgaccgcatgcgccttgccagcgtccttgcagaagctgttgaattgactcgtatagtcgtcgcaaaaatcgtcgagttcgggatgcgagacggcaagcgggcctttcagcgccgcgaatttttccggatcgcgcacgctccagatctcggatgcctcaatgacggcgggatgcgcgcgccacgcctgagaggacagcatcgccctggcgggacgaccggtattgcagacggcgacgacatccgtgcggccggggctcgcctcataggaccggcattcgttgaaccggatgacgaagccggccgcggcgacagccgcggctccctccgcaccgatctcaccattgccgacgatcatgatgctctctgccacctcagttgctcaacgcatcttcgagcgccttgagctccttggtcctggcatcggtcacgttggcgatgcagccggccaccagcatcggctccatcgtgccgccacgcgcctgaaagccggccgcttcgcattgcgcatcacggtaggtgatccatgcacgctgcgcggtcaccagcgctttttcggcccccttcatgtcatcatcctgatcgctatcaatggcgaccatggcggcgcgggtcttcttgtattgaacgttgagcgccttgtcggcatcgtcctgccgcgcccgctcgcagagcgtcatgtcggtctgcgtcgtcgggctcgtgcaatcgatctccgtcgcgctggcagcgccagccgccatcagcgaaagcaggccgaaggccatgggcatcaaaatacgcatcatcttctcccgggccccgatcacaatttgcccattaccagctggcggaagccatagacctcgcgcttgccggacagcgggatcagcgtcaccgaacgcgtctgcccgggctcgaagcgcacggcggtgccggcgggaatatcgagccgcatgccatgcgccttctcgcgatcgaaggacaggccggcattggtctcaccgaagtgataatggctgccgacctgcaccggacgatcgccggtgttcgacacctcgatagtcaccgtcggcgcgccggcattgagttcgatttcgcctagtgcggcaatgatttcgcctgggatcatggtttaactccacctacaatagacacaacgtagtcagggtaacagaacgtccagatcgagaatcccaacgttgcggatatcaatgtaaaatggaaaacgtatcgaactggcttgagccatttgggcgacttattgtcatagtaggatgcatacccactaggatcttccccatactcaagaaagtagggctcgacccagtcctttaggaacccttcggccgtttgaatgatgcgcctgtgcgcctcatatcgaagtaaactataaatagaaaaacaaacaggaaggagaaaaagagccctgataaaaaatatgtcagataatttcagctgaaaagcgaagtagtatatcgcggccgtaatcgacagataaaatatctcagtcttatttatctcatcgatgtcgctatttatacgacctcgcacaatagaatattccgccattaggagcgcggcggtttgctcttgagttgccttcttcatcgccgctaccggatgggttcgtgaacggtcaccagcttcgttccatcagggaacgtcgcttccacctgcacgtcgtggatcatctcggcgatgccgtccatcacctggtcgcggccgatgacatgagcgccggcttccatcagctcggccaccggccgaccgtcacgcgcgccttcgacgacgtagtcggtaatcagcgcgatcgcctcgggatagttgagcttgacgccccgctccagccgccgccgcgcgaccatcgccgccatcgaaatcaacagcttgtctttttctcttggtgtgaggttcatcgtgcatccatctgcttgaactagagattccagactttcggcacaggcgcgccgttgcgcaaggcggaaatgatcgggatcaggatttttcgaagagcgaagccgtccgaagccgcgagccgcacgacgagcttgcccgcccagcagctggcgccgcccatatggccgtcgagcaacggcctgaccgcattgagatagccttccgcctgcggcccgacatagagcagcgtcgcgaaggcaacctggcccgacagcaccgcctgctcgcgcgtcagcgcctggacttcgcccgcaagcctcagatcctcggcatggaaaagccggccttctctgcggatgcgccagcggtcgcgaaacagccccgaaacgaccgcctcgcccatcgccttgcgcccgagcagcaccgcttcgaccgcgagaaattccgccccctcgtcgagatcgacatccagtcggcgatagagcgaggagcgatcgaagaggatggtttcctgcggcagccagtcgacccgcgcattggcgccgacctgaattttcgtggtgatctcggcggtgccggcggacgccttgtagattttctcgcaggcctgcgtcgtcacgtcgatgcgcgtgccggggccggcaacgacgctccagtccatgcggtcaccgccggtaagtccacccgccgtattgatgatgacggcctccatcgaggcatcgaaggtatcgggcagccggatcttcgccgcaccctcctgatagagttcacggatgcacgtgcgcccgcccagcgacttcgcggccagatgcccgcggccctcggccctttgcggtctggtggctgccgcggcgttcgtcattctgtcccctcgtgatgcccgccggtttgcccggccgttttcgttcaatcctgtaaccgattgaaagcaagcaatttccgtgccgcacgccgggcaccgcaatcccggcgccgaccctgcgggcgcgtgtcgccgagtgcctttaaaagcggcgaatgccgatcagacggtcagatgccgacgtgcctccggtgtatccagcgtttccgccagcccctcgtggacgatctcgccgcgatccatgatgtagacgtaatcggcaagctcgcggcagaaatcgagatactgctcgacgagcaggatcgccatgccggtgctatcgcgcagatagcggatcgcccggccgatatccttgatgatcgacggctggatgccctcggtcggctcgtccagcacgaggatcttcggccgcgtcaccatcgcccggccgatcgccagctgctgctgctgcccgcccgagagatcgccgccgcgccgcccgagcatggtctgcagcacgggaaacaggctgaagatatcgtcggggatattcttgtcacgacgcttaagcggcgcgaagccggtctcgagattttccttcaccgtcagcaacggaaagatctcgcgtccctgcggcacatagccgatgccctgcttggcgcgcgcatagggcgcaagcccgttgagcctggtgtcgttgaaggtcacggttcccgatgacagcggatgctggccggtgacggcccgcagcagcgaactcttgccgacaccgttgcggcccaagacgcaggtaatcttgcccatctcggccttcagcgagacgccgcgcagcgcttgcgccgcgccatagtggaggtttgcgttttcgacggtcagcatggttttcccctatgatggcttgcggttgggatacccccctctgccctgccgggcatctcccccaca

SEQ ID NO: 36 - DNA, 48718 bp, Rhizobium matallidurans
  source 1..48718: mol_type = genomic DNA
tgcgtgacaacagccagacggaaccggaaacaacaccagagcaaggctaccaccttacgcccgatctcgtccgcaaagccaaggcgatgatcgccgacgcgaagcaggtcgcgcccaacaaaccgttcttcatgtatttcgccaccggcgcgatgcatgcgcctcatcatgttcccaaggagtgggccgacaagtacaagggaaagtttgacgacgggtgggatgccttccgtgaaaaggtctttgccaggcaaaaagagcttggcatcgtccccgagaataccgaactatcgcaacacgatcccgacgtacaggactggagcaagctttcggccgatgaacgccgcctctacgcgcgaatgatggaagtcttcgctggtttccttgagcataccgatcactatatcggcgaactggtcgcgttcctgaaagacatcggcgaatacgacaacacgctgatcatggtcatttcggacaacggagccagttccgagggcggcccgaacgggtccgtcaatgaaggcaaattcttcaataacgtgccggatgacctacaacagaacctcgcggcaatcgacgatcttggcggaccgaagtatttcaatcactatccctggggctggacgcacgccggcaatacgcctttccggcgctggaaacgggagacctatcgcggcggggtttcggacccgttcctggtttcctggcccaagggcatcaaggccaagggcgaggttcggacgcaatactgtcacgcgatcgacatggttccgaccgttctggacgccttgggtatcgagcctcccacgcaaatccgaggagtgacgcagtcaccgatccagggttacagcctgaagtcgtcgttcgacgatgccagcgcaccgtcgcttcacctgacgcaatatttcgagatgttcgggcaccgtgctctttatcacgatggctggcgggccgtttgcccatggccaggaacatcgttcactggatcgggcctgagcttcggcgcgcccataacctatgagaaattgaccgaactcgatgccaaggggtgggaactctacaatctgaatgacgatttcgcggaaaccagaaatctcgcgggaacagaccgcgaccggctgatcgcgatgatcggcatgtggtatgtggaggccggcaagtacaatgtccttccgatagacagtcgcgggacggcgcggtttgcggatgagcggccgcaaatcgcgcccaatcgaaagaaatacatctactatcccgacacccaggtcgtgccatcgagcgccgcgccctaccttgtgaacgtggcgcattccatctcggttcaagcccatgtgcccaaaggcggagcggaaggcgtcctgttctcgatgggcggcgtcgacgggggcttcgtgctctacgtcaaggacggcaagctgacatacggttataattatgttgccgacaaacgcttcaaggtgcagtcggacgacgacattccagagggtgagcatatcttcagcttcgagttcacaccaaccggaaaagccgatattcccaagggaaagggcgtaccggccaagatcaaactgtttttcgatggaaagcaggcaggtagcggcgatctgcctgtgacaatacccatctcgctgggccttgcggctggcgcttgcgttggcgcggactccggatccccgacaatggacacggagtataaagcgccgtttccgttcagcggaactgtgaagaaagcgctcgtggatgtgacgggagaacccgtcgaggacttggccgcgaagatgcgcgtttatctatcacgtcagtgagaacgacacgccgtggacgaacgtggtatggcccggtggcccataccatgtggcctttggatttagtcgaaccgcggcctcgtggttagaaccgtatttccagcgtcaggattgggccctgctgcacggcatcgaaaacgaaaccatcgttgttgtaatcaacgcctagcgcccggtaaccggcgagtgccgaaatcgactgattgaactgatagccgacggcagccgcgacgtcccagtcgacgttagcacctcccccaccgaccaggccccaccctgtcaggtagatttcgggtgtaatggaataccgtccgcgaaagccggccattgcatcgacccaggtggcttcgtcggtagcggaccggccatcaaggatgccgccgctgaaggagatttcattcttggcataccacgtgcgcgcgccggcagcgaggtcgagccgacctgcgtcggtttccagtaccgtgtagcccacaccgatcagtcccgcgaaggttttggccgatagatcgacgctcgaggccaccactcccctcggcgtaccgctttgacccgcgatcttcgtgtaaatcacgtcaccgaaaatgctgtaggggccattgcgcgcttcacccatagccatcgcagcgaaatcgagattgctgaagatgtcgctaaagcttgcatcgacatgtgcttcaggcagtccaaaggaggcgacgtcccccttgagacccgccgcccagaaatagggcgcgatggagaatgtccaaccgccatcggtcgtggtctcgttgaccgctggcgtcatcggagacgtgatgtcagccgcccaagcccgccctgcgccaatcgaaaaagccatcacgggaacaagtgccagcgcaagatatttcatctttcccccccaagtgttttcatgccacaagccgccctcttcaaatcacaccaggtaggctacccgagacatagtgaaaatgatatgattaacggcgcgaagtttgttcactagtacttccaactagcttcaacgggatgacggctgcatatcataggtctggccgtcggatcgtagttgctcaagtgttttgtcgacacaagtgcctgatgctccgggagcgacccgctttgcggtcccgtccaggctgaattttcctccttggccgtcgggggacaaatagatagccaacccgtcaggcccgatcttcgacagataatagaaacgatgaattcccttgccttcgcaatggaccatcactgggaagtcacccactgaagtaccagcggcggcggccgacgatggggaaagaggtgacgtctgtgacaatatcaacgccacgaacgcagtccccttggtcgtgcgacgcacctgagtgctgaagttcattgccctaccctccgattgatcgatgcgccacatggcgagcaaaccctggcaagtgtaaacaatcgctgcattgatctggcgcgaagtctttttgacgctcgagcgaccgcttgtcgtattttggttcaacgtcatcatcttttttggtgtggccttgatcgcgatcaaggccgccatcgacgaaaacgctgagatgtttcacacggatgcttggcgaggagaaagcaatgttgaccgaacctgccattcctgtggctacgagaccagccgccgcgcccccagggtttcatcttttggcgaaacccagcggctcgacttgtaacattgactgcagctactgcttcttcctgtccaaggaagctttatatccgaacgatcgcagtcggatgagcgaggcgacactcgaaacctacattcgacaactgttggaatcccatctgacgccggaagtaacggttgcatggcaaggcggagagccaacgctgatgaagctcagttttttcgagcgtgccgtcgacctcgtcgacaagtatcgcaagccgggtcaaatcgtgcggcacacgtttcagacaaacggccttctgcttgacgatagctggtgctcgttcttcaggaagaacaacttcttggttgggttaagcgtagatggaccgcgcgaattgcacgacatctatcgtcgtgaccggcgcggtggcggaacgttcgatcacgtcatgaagggcttgaagaaccttcgtcgccataaggtcgaattcaatatcctgtgcacggtcaacgcggggaaccaggcacacggtcgtgaggtttatcgcttctttcgcgatgaactcggtgcgaagtggatgcaattcatccccattgtggagcgcgcgacaaaggaaacgattgacgttgccaatctcgggtggggagacaagactcgtgatggcaagcgacttctctacactcaagccggtgagcttgttaccgaccgcacggtgggtggtgaagcatacggacggtttctgatcgacatttatgaggaatggatcaggcacgacgtcggaaacgtcttcgtacagcttttcgacgttacgcttgaggcctattacggcaggcatctcctgtgcatccacgcgccgacctgcggcttggggcctgctctggagcataacggcgacgtctacacctgcgatcattttgttgagcccgcgtataaactcgggaacatccatgaaacaccgctgcttgatctggtcgcgtcacctccgatgcgcaaatttggatgcgacaaacgcgacacgctaaccacccaatgtcatcgatgtgaattccggccgctttgcaatggcggctgccccaaggaccggtttgtcacttccagcgacaatgagcccggccacaactatctttgccctggttatgaactgtttttcaagcacactcgccccacgatgcgggcgatgatccaattattgaaacatgggcgcgcaccatccgaaatagttcaatttatgacccgcgaggatgccaagcgtggaccatacgagccgtgcccctgtggcaatggcaggaaattcaagttctgccatggaaacgcggccgccccgacgcgcggataggcgtgcgagtggggtgaccgcgactggtggaaatggagaacaggctcaaaatcaggtgcgtgcaaagtgagcctgtaaaggctgagctctgtgggttgtatgttgcgagctaaatagttccttttgcgtcatacagtcctatgtattacacaggtctgttgaaagatcgcggtgaaaacgatgcccagtgtagcaatcaaggttctgtcgacggtgaacgccccctatgggacgaacctttcggccgagcaattggcggcgaagatttccgatccagcaagcgtcgaaaatctcgatccgtcagcattttccttctactccgaagtcgacgaaagccttcagaattcgtttctgaacgaaatgcatattgatcattccaaagcgtctgaaattgcgcggaaattctctgctctcgcaggatactcgatggcgttggccgcttagtggtatcgccgtcgaaaagtcagtgggaaagcctgtttgatcagtcagtagcgagccatcaccatcacgacaagccggcgttaactttcggctccgagactatttccgcgacgcactcggcacacgggtgtcccctgaacgtcgatgcttcaccgtcaagaaccgcgagttcgcaatttaccggtcgccctctctcaccacgcgttcgtacattgtcgtcttcatttaattgctccatccgcttggaacgggtcacttgtgaacgcaaggttttgaggagcttccagtccttcgccgacgacactccgacagcaacttgagcctggcgcgccgttctcgatcaactgtggtgaattgcagaccccgatttggagtctttggtatttgcctgatacgaggtctttgaaaagcagttccttcgcgatcaggtccagcccaaatgagggtgatactcgcctgtccccctgtcaccgcgagttctacaattttttgacgcattgttttgaggtggtcccgtcgaaggccgggatcgggatcgaatagagttgagagttgcgccgcctcccccagccgcggtcggggcggcaaggagctgacaaaacggccttcgagcacaataaaaaaaaattccagaaaagtgatttttcaaagtttgaccgccgagatcgggtcgactcaatacaacctgctcaagaaagctatcaaaccgactgacgaaggtatcacaggtacgtggcgaatttcattttgcgaccgaaggcggcttgtttggatgcggcggccaatttctctagccgttcgatccgctcgtccttgcggacttcacgaagcccgatcagcatgcccgcgggaggcaatatcgtctgaaagatcgaccgcagccagcggcggcaaccatgcgagcgctgaaacgacgaggccggacatcgcggacggggccctgatcatcaagcaatcgatgtccacgaaacagcctaccagcccgggggaactatcttcacagatcatccggcgcgcgcgcgtcgttgatctcatccaaacgagacttattccgctggtcttgactatcaagcgcatggacgacgaatatcctctagatgaccgataccctgaccccggacgcgcgctccgctcgaatggcgcggatcaagaacaagaacacgaaacccgagataaaggttcgagggctcgttcattccctggggttccggtaccgtcttcatgggaagaacattccgggcaggccggatatggtcttttctggtcggcggaaggtgatattcattcacggctgtttctggcatcgccacgccgattcggactgtgccctggcgcgcatgcctaaatcgaggctcgatttctggaaaccaaagcttgaacgcaacgccgagcgtgatggcgagactatggaactgcttcgtcgggctggatgggacagcctggtgatatgggaatgtgaactgcgtgacatgggcgcggtcgagcaaaaagtggtggggtttctctgcgatgaagtcgattgaattgttcgctggagccggaggtcttgggctgggcctgcactcggctgggtttcgtccagcgaacgtcttcgagtgggaccgctattgctgcgacaccatccgggaaaaccaggcgcgtggcgtgaacgcggtcaagggctggaaagtggttgaaggcgacgtccgccagtccgatttctcgcggttcgagggcaagatcagtcttgtttccggaggtccaccctgccaaccgttttccatgggcggaaagcacgccgcctatgatgatgcccgtgacatgtttccccaggcaatcagggcggtgcgcgaagcgcggcccagtgcgttcgtgttcgagaacgtcaaggggctgacgagggcgaccttcagcaattactttgaatatatccgactgcagcttgaacatccggagatcgtcaagagggtcgacgagccttggccggaccacttcgcgagactggagcaacatcacagcagcggcagccacgatgggctgaactaccgggttgtgacgcaactgttgaacgccgccgactttggggtgccgcagcgacgcgaacgcgtgttcttcgttggtttccgggaagaccttggcatttcctggagtttcccgcggccgacgcactcgcgcgaagcgctcatctgggacaaggcctccggagcttattgggatcgagcccggatcgcgaaaaaggatcgccctgccctcgggatcgacacctcccgccttgatcccgaccgcgcacccggggaacttgcttggatgaccgtgcatgaggcgatatcatcattgccggaaccagggcgcgcccattcggacatgccaatccacaaccataaggcccagcatggggcgcgctcgtatcctggacacaccggtagtccgcttcacgagcccgccaagaccttgaaggccggtgtgcacggggttcctggcggagagaacatgctcttgagaccagacgggaccgtgcgatacttcacggtgcgcgagagcgctcgtctgcagacgttccccgacgattatgtgttccacggatcgtggggcgaaaccatgcggcaactgggcaacgccgttccggtgaacctggcgaaagtggtcggtggttccgtggcggcgcatttgaaggccgccgcatgaatggcggaccctacaatccgctagacaaaatcaatcttgctcgaagcatcgagacggagttgctatcgcgacaggcggtgggcttcgaccaactcagtgatgttcgtggggcgggtgtctacgcgatctattatttcggtcatttccccgcttacgcgacgatcgcggcgaggaacctggacgggaagttcgcgcagccgatctatgtcggcaaggccattcccaagggcggccgaaaaggcggaatctcggctgacgcccttgctgggaagccgcttctcgaccgcttgggacagcatgcttcatcgatcgaccaggcgacaaatctttccatcgccgacttcgcggttcggcacctggtggtggacgacatctggatcccgctgggcgaaaacatgctcatcgagacctacaagccagtttggaaccgggccttggatggttttggcaacaaggatccgggacgtcgtcgcgccacgcagtacaagtctccctgggacgtactgcatcccggccgaaggttcgcggagaagctcgcggacagcggcttatccgaggagttcctcgccgagcgagtggacgactatctaaacaaccgacccatgaagcgactgccccgggtggtggaggaacaacaggcggaagaacaaggagaagccgagcagggcgcggatgatggcctacgtcatctcggaacaacggatcatatctgatactgtcagcgggcaatcgacggtaagagatcatataaacactgcgcagcggccgggaaacgtcgaaaccatcatgcgtgatttagggagcgtgtcttcgatccatcccccatcgaaggcaagggcggctacccgagccggcgcttcttctacttacaagaagcagggatagtcataagacaagcgtgccgcgatccttcgggttcgctcgtcacgctttaagtttttgttctgtcgcatgtcggtgccgcaaaaccgccgcaccttttgcggggatactttaggattctaaatcgggggcctggctgagcgtgagcgatacccaagcagtgtgagcttgagagtgaattctcgcaggtcacccgaccattcgacaaagccaagttcgcgcgctttgaccgccgtcttcaatccgaccccgtgtggtaatgacttgaaggatctgcgtgataggctgtccaggagaaaggccaggcgcccatcaaggaggatttcgctccgtgacataggggaagcgctcatctcaagcctgcctgcttctcgaattgccgctcacgagccggatatgctgctcggcaggacgagtcacttcaacaccaggctcgcggatggtcttgcgacggttcagcttgaagcggcccaccaggcccgcgagctgctcggagtcggacgccaaggcatggcttatagccgtcgtctcttcgaccatggaggcattctgctgtgtcatctggtcgacggagttcacggctgcgctgatctcgacaagaccgactgactgctcattcgcggcagtggtaattgcctccactttcacatcgatctcgctgacgaagctgtcgatccgatgcagtgcatcgacggtctcggcgaccatcttcacgccatcggaaacatctcccgtggaaagctggataagacccgcgatctcctttgccgccgtcgcggatctttgcgcgagttcgcgaacttcctgcgcgaccacggcaaagcctttacctgcctcccctgccctggcggcttccacgcctgcattcagagcgagcaagttcgtctgaaacgcgatctgatcgatgacgccgatgatctggccgatcgccgccgaggagttctcgatccgggacatcgccttgatcgcctcctggacgacggccgtcgatgcggtcgtgcagcgacgtgcatcccggacgaggtcgcgcgtctccgcggtacgttcactcgacgcccggacggttgccgtgacctcttcgagcgcggcggcggtttcttcaagcgcagcggcctgctgttcggtgcgccgtgacagattgtcggccgcctccctcatcgcctgggagttctcggtgatgtggcgggtcttgccgagcacctcctcgagcgtcgcctggaaagtcgcgatcgaactgttgaagtcgtgtcttagagcctcgaactcagccgagaacggcacatcgatcgtcatgcggatgttgcattcagcaagccgccccaggcccgcgccgagggtggtgacaacctcctccagactggctgcctgctcagcctgttgctgttcccgcagttcgcgctcctgctccgcgcgttcgcgcgccgcgtccatctcctcgcgcagccgcaacctgtcgagagaggattggcggaatacttcgacggatcgagccatgaccccgatttcgtcctggcgagccatgtaggggacggcaaccgtgaagtcgccctcggccattcgtcccatgtacgccgcgaaagcgcttaggggcgcgacggcgcggcgtcggatgaacaacaggcccgcggcaaagatggcgatggatgcgatgccgcccgtcatcgccattcggctgtagaaggcatccttggaggccgcgtatgcctgggtctcagcgatcttcttgttcgtggccgatacaagcccgtctacagctttttggtggacgtggaaccgctcttcgagcgtgtcgagagtatctcgcatccgcatatcgtcatgggccgcggccgcggtgaaaaatggcccagtcaaggctacccagaatgaatccgctgtatccgccgtccctcggatgcgctccttcaaatcgccgggcaagtccgacttctcccaaaccccccgacgctcatcgtaggaggccttcaatgccttgatcttttcgaggttccgaagcgttacgtccttgtgaatgaacgcctcgctggccaaaccgtaagcctcgacgacgtaaagcggaggcggtagcacgtcggccacaagatccttgttctgttcgacgcgaagggagaccgggcctcccaccttgagttcgccgagcgcagttcgttgcaaccccagcgcagtcaccatccccaaaggcacgacgaggccgaaggcaagcgtaaggcgagagatcgataatgtggtcatgtcccgaaccgaggtgagagaaacgtctgcttgggaagaatgcgtgcgagcgtttgctcaggcgtaaatttttagctcgcttgaaagcgatctttctgagcacctattgctcttgacctccacaaagaacaccctgtgctcacaactcggttgtccggctgattcggagagcacgaggtgctcaaacatgaaagtcctcgggagccagcatgcctatccgcacagccaccacaccggacaagaggacaaagctgctcgaggtgtttctgggggccgggtcgtggacctacagcatccaggcgcgggatatcttctggtcgccaggcctttacgccttgcttggcttggatccacataccgtcataccaagccgcgatctttacgacaccatgatccacccggaagataggttgtctcatgacgaaatcgtggagcgggccgaagctggagagctggcggttcgtcgcttcaggatgatcaggcccgatggccgtcttctctggctggagagtaagtcgcaacgtgagtacgacaggcagggtgggctgagcttcctgcacggtgttgtccaggatgtgacggacgatcagaaggtccgctccgagaacgctaggatccggcaagctgtcatgtcgatgaagaagatcaccggagcagacttctggcgcaccgatgccgaaggccggatgctcgataccgctaattgggcgcagttcacgggtgtcactcctgaacgcctgaaggatcatgaggccctaacagcgatccatcccgatgatcgggacattgtcaggaaggcacgggagacagggattcggctcaagcaggaggtccagttcaccgtgcgcgtgcttggcgccgacggaaactatcgcaatgtggagcacaaggtcatccccgtggtcatggacggccagctggttgaatggcatggcatgtcctggatcgacaagcaggcagtttcagacagcgatgaggcgccgttgctccgcgcctgtcacatacgagcggcgcgagccctcatcggcatgacagcgcgtgaactggcggaagctgtcggtctctcattctcaacgatccgccgcatcgaggatgatgtcgatgcaccgaggtcgtcagccatggacaagatcaggttcgaattgacgcgcagagggatcagtttcagcgctagcgcggacggcgccgtgacgattgcattgaagccgggaaccggaaaataggtccgagccacccgcggcgagacttgtagccaaacagctaacatccgagcgtcatgaaggcggccaaggtagcgaaatcggtgcttctcgcgcaacagcacccattttttgtagctgcatgagcatcttaccgatgtcgtacggcttatcgaagaaaatggcccgctccggcaactcgtgaatccgtggtcgctgcatccccgatacgacgatgatctccacgggaggccacctgtcccgcacagaggcggctagcttcagcccgtccatgctcccgggcatatcgacgtcggtcataaggatccggatgcccgggaccgtttccaacaagatgactgcctcgtccgcattggacgcttccaggacctcgaaccccgcctcctcggcgacctccacggcgagcatccgcacgagcggctcgtcgtcgacaacaaggacaatgtcacgcattttcattcctagcggttcgaagctcactaacctgttggcggccgttgggttcccgcaatgcgaaactaaggtcgaacacaaggccatccgctctgaactcagttcggctagaggcgcgggccgcggccgggaaagcgcgttcgatcaggacgcttccaaaccccttccggctcggctcctcaaccggtgggccacctgcctccctccaagagagatcgatgcctcgcccagtatacgaccaagtgatgctcaccctaccgttttcggcacccaggcttccgtacttcgtggcgttggttgccagctcatgaacaaccagggataaaggaagggccaggtccgctggaaggacgacgtccggtccctgaacggtaatcctgtcggcatccgcggagtgagccctcaaggcggctgccagcacgtccttcatcgaggatgcggagccttcccttgagaggatgagatcgtaggtgctcgccaaagccgacaagcgttcggagaaggattggtagtgcgccggatcagagcgggcaaaggtttgccgggcgattgcttgaaccagtgtaaacccatttttcacgcggtgggcgagctcgcgaaccaggagaccgcggtcttcctcggcctgctcgttctggacacgtcgtcgctcaagttcgtcaagaagcgcatcgagactggcgccgaccgcgtgaagctcgtcgattggcttcatacccgttctggcggttgtcgaccccgatctccagtcatccatcacatctccaatgcgaacgatgggtgataggataaagcggttgcctatgaagagtgccagcagcagggagacgacagcgccgagcacgattcccaagctgttgacgatggttgctctgttgatcggtgcaaatgcctcggatgtcgaaacgcctgcgctgacgtagagcggacttcgaggctgcgcgatcggtcggtaccccaggactcgctcggtgccgtcctggcttgtgagctggatgatgcccggtttgtcggcgtggacgaggcgctgaaattcgtcagggataaccgtgcccacgaaacgttccggcagcgggacgcgcgcaaccacggttccgtcctcatcggcaagcgtaacggcactcccgggcgacagccctctctcgactatcctgttttgaagccagtcgagcctaattccgcttacgacaaccgcggccaccgcactgtcttcgacgatcggcatcgccaatggaagcacagcggctcccgtcacccggcttttggtgtacttgccgacgacaaaggcctttgtttcgatcgccttgcgtacatagtcccggtcggcgaacgcaatcccggcagggattggaatgctgccgcagaccggggttccgtctagtttcacgacgaagatcgtcgctacgttcggcacattgccggcaagcgaccggagagcatcgttacagttgccggcgtccagatgacgaaccgatggcatcgacgttacggcgacgagaagagactgcacaccctccacgatgcgctcgacttcggatgatgcctgccgggcggcttgagcggcttgggcgcgcacctcgtctccccgctgctggcgcatcgcatactcattgtatcccagcatcgtcacgacggggacaagcgcagcaaccgctacggcaaccagcttcagtctcatcgaatgtccctcaagctggcgacgaaccagcggtagctcgaaacaaatagggcacttcaagacatcagtcggagcgcccgatggcctcggcttcggttggggaagcgcgatacccataaacacaaagaatagattcgttaaaatagggcaagtccgcgttttgcaagcggccgacagccccaaggagcgccgctcacgcacatagcgatccacccgatgtcgcgctcttccggtcgctcctatcataactggacacgggactgcccgtggacttgggaaaagggttcttctagggtcggccgcccgccactcaccgagagaacttatgaactttccgattgtcgccacggtcatctcgatggtcctcggtctcgcggtgacccgcctgctgagcggccttgtaacggtattccggatccgcggaacatgcgcgttcgactgggtgccgatcgcatggtgcggcattctcttcgcgatgcaactggatcactggtgggccatcaaccagctccccgcgtaccggaatacgtttcagttcagcgaattcattttcctggtcatgatgaccctgatgctgttcctcgccgccgcgctcctcctccccagtcgtgcggaagacgaggctcttgggctccgggtttattttgagaaagacggccgtttcgccctcctctcgatcgcagtctacctggtgtgcggcttcgccttgaacgtcatcggcttccagagcgcggtcgcgtccgcgtgggcgctcatcgacgttccaatgattatcctccccgcgctcgccttcttgctgcgtcagcggcggtactacgcgacgatcaccgcgatctacgttccgctctgtgcgctggatatctgggtttcgctcacgtcgtagcttccgtgacgcggtgtgatgggttcgttaccagcgaatgaacatcgattgcgtccgcggcgccccggtacgatgccagaaccccatccgtcaggatggcgatgttaccacccaatgtctgaaggatcgcgagctggccgccactacagtcgccagcccctgccagacgcccgagatcgaaaaccggaatgacctcgcccttgaatgaactgtaaccagatgggccgctttcggatgagtgcaggctgctccactcttcggcgcgggcaacgatccgcccgccgtcgaacgtataatacttgtcccccagacgggcgacgctcacgtctggtctcagaaggtttgaaagaaacacgatgcgctgtccctcaaggcacaggtcgttgaagcgcactcgtcgaggatgggaccaccacctggctcatcatgagaccagctttcgcccgaccgacgttctttagcaccggatcatgtaagacgcggttgaaggattgcctaaagtttgagcgattgtttttttgcattggcgtcgcgccaagggcgctcaacccatcatggggagcgcccttgttcacccggatgtccgcggggcccgcgaaatcatttcgcggcaagccgacaatcgttggttcgggtggtgacacataaatgatgtgtcggcgaccattcttcaagatcagagcgtcttcgcggtcgtgtccattcaagcgcgatgcttctcctcatcctgatgggtcttcatgaaaaagaccctcgacgccgggaccgcacccctcgtgccgagcggctcgctcgtatgcggtgaccgtgtcgtcctcgttcgtcttcatggccttgaggatagcggcgtcgcccatcatgtcagcaagcgcaatcttgccagttgcgcgcatctgcttcatgtcgccttccgtcggcgccgcgatacccagctcgcgggcctttcccgtgagcacattaacatgcgaaggcttcaccttctggctcatgtaattcgatgccatttccagtcatcgcgacaaggagctagccgatccgcggggcctcctggcgcgcgccgccggcattgacgtgaccgaatgccgcgtccaccacgaaagcggcgatcgcgggacgcagcgcttcgaccgcgtcgccaggggccagagacgccacatgcagtcgctgcttcgccgcgccaagacgattgcacaagacgattccaatgcggcgggagcatattccaattgacgaacgaacgggttcccactttcacgccaccgtaaggctttgtcatggccaacggtgggatcaagtcttccgctgggcaagttcgataatgatgccatcgggatcgcgcacgaaggcgactttttgcagcacttcgggattataagcgaaacgcggcctctctttgacatcaacgccagccatctcgagcctggcgaaggtccggtcgacgtcttcgtataggaatgtcagatggcgcaatccggcggtatcgtcgggcacgtccaccgcccgcttgaccccgttagtgggagcgatgatctcaagcatcccgccgcccgcgtccaggaaggccaactccgcgccgtcatccgtctttttcctcagatgcagcttcagcccgagtaggtcacaatagaatgtgaccgcgcgatccatgttgctaacggtcatgcccacatgttcgaaggatttcagcattctcgacgcgtccccggctcaattggtcaagctctcgaaactagtcgtcgggagccattcaacaagagtgctggcaaccttgggccagagcaggtgtcgacccaatcgcattggatcatgaaatcggacggccacccccggtgcaagaacgtacgacaagcaaccgcgttgctggcaacgagctggattagatcagatggttctggtttgcatggctgggctgcaatcaaggagcttctcgtcccaactctttgcgtttatatcggcggcacttgaggccgcctgccgaatgttcggcgttcgcggcctttgcaaccaacgggcgctccccacattctgggttgagcgcccgcggtcgttttaagccacgcggctccagggggctctttcctcgggtgccggtccgggagcttaatccgcaaggccgaagatgctcactggccgttcgaggccacgcaggttatgcgatccgagatcgagaaaccctgacgacgaattttccacgagtttgacgaagtcggaggatagcaacaccggccgtttcagttgcttcgtgagctcctccagtcgggacgcgatattgacggcgggcccaatcgccgtgaaatccaggcgcttcctggacccgatgttgccatacatcacgtcgcccacatggacaccgataccgtaccgcagcggcgatttcccgcttttcacgagctcgccattcaagacgtccattctttggcgaccatccttgatggcttccaatagatccgcgtgggcattcgggttggagagagggaacacagccaagaggccgtcgcccatgaatttcaggatctctccgcccctggcctcgacgggttcgcacagcgcgtcgaagtagccattcagtatctcgatgatgtcgtctcttggccacagatcggacagggcggtgaaatcgcgcaggtcgcaaatcatgatcgcggcactgacggtcttgccactgccccgggtcgtcgcgccagccaggatctccgcgctcgcatgtggaccgacataggtctccaggagcgtgcgggccatggcattcttcatgcggatttcgctcgccagggcgagcgccggcagcaggtcccggaggtaatcgatgtcatgctcgcgaaacccaccggctttcttcgtggcgaaggtgacgacatgacgcttcccccaggtatgctccatcggccaggcgacataatccgtgaagccgtcacggcgaagctcctcgaaaagaggatacgccgccacctcgttggcgctcgcgtcaaggtgttgtcgaacttccgttgccccattgtatatctcggtcgctggcctgcgcaggaacagctccgtggtgtcgacatcgtaatcaaatgtgtcgatatgggcttccttggcaccgggctgccacaggattcgggcgccctgccattgagggtgctggatcctgagatgaagcgacgacctcgcgaccggcacaccctccgccaggaggcgctcgcaaaaatcaacgagcaagttatccaggaaacgctgcgaactcgtttccttcatgagccagtccaggactgggcgacgctccctcggccatgtacccctagccctgggttgcggcgtcatatgcgtaatggtgctcatcagaatcctccgagcacgcattctatggcggttggcgtgagtgtgaaaggaaagatcgagcaacagcggcacctggcgggcatccaacctatccgcgggaacatatccgccgtcggttttgcccaaggcgcgaatgtcttgccccgtcccctgcgcgaacgctctcccgggtctagcgatcgaaggcatggtatggcggcgggacatcgctccggcctcgatcgtgccgcgacgctagctaaacaggcgcggaggagacgtttcgagacgccgtttctcaatcctgtctctgtttgcgttcgacgaggaggatatggtccgcggcgagcacgacgtcatcgcgctggttcaggacctcgcaacgctcgacgacgcgtcccatgtcggggcgcttcggatcgtcctccttcatcgagatcgtcacgcgcgttcggatcgtgtcaccgatatgcaccggacgcacgaagcgcagccggtcatagccataggagaacgcgaccgggttgatcaacgtcgccgtcagcccgacgccgatcgaaaacaccatggtgccatgggcgatgcgctggccgccgggaagcgtcttggcgaattcggcgtccatgtgatgtggaaagaagtcacccgtgtgcccggcatggacgacgaagtcggtctcggtgatcgtccgaccggtcgtcacgcgaaccgcgttgagttcatagtcttcgtaatggataatttgctcggacacgtgactactccttcggcaagggcattagcggcgtcgccgggctcccgctggattgataggcggcctcgacgagcgccatcgtccgccatccatcctcgatggcaccgacaagcacatcgtcctcgccagaggcaaaacgctgaaggttcgccatacgattggcgaaagcgtcggggaaccagcttcccttaagcggcacggcgacccagtcgtcggcgccgtgacccctgatccaaagttcatcgggctcgccacgcggatagtcgagattgacgccaagcttcagatatgcggcgcccttcgtgccgcatacgcggaattcgcaggcttgaaagcgtctgccgaaatcgtggtcatggttgatggagagcacgcaacggatcgtctcgccgtagtcgaggattgccgcggtgcgggtctgcgccacctcgtggttcggatgaccgatcgtcttggcgtggacgccaagcgggtcgccaagcaaatccctgacaacgtccaggtaatggatcgagtgcattgcgatctcgatgcgcggcaggcccttgaggaagggccagagaccccatggcgtcgcgagtgcgagccaggcatcgaaatcgacgacctcgcctaaatatccaccggcgatggcgtccttgagcgccagcatcatcggcgcgaagcgaagctggaaattgacggcggctttaaggccgcgggatcgacatagggacaggatctcggtggcttcctggagattgccgcccatcggcttttgaagaagcgcgaaggagcctcgcgggagcttcgacaatatcgcggcatgggcggcgggcggggtcgccagatcgaagatcgcgccctccacggaaagcgcctgctcttgcgagacaaaggccgccgtgccccattcccgcgccaacgcgcttgccttggctaaattcggatcgaaaataccagcgaccgggaaaccggccttcttgtaagccggaagatgggcgtccccgacaatgctcccagcaccaaaaatcacgattgggcggggcttggcgggaagcggccatgattgtcgtaggcgacttggatcaagggcttcaaccatggtgaaagacctcttccatcatcgcccaccactcgcccggctttcgcgtctcgagcggctgttgctgcggcatgcagatggcccaccattccttgtttttagggtgcgcggccatccttgcgatgtcggcgtcgaaatcatccccggtatattcccagtagccgaacagaaggttttccggctccttgaggaagatcgaatagttggtgatgttacattcggagatcagcgccaggatctctggccatacagtcgcatgaagacgcttgtaattcgcgatgttcgccggctttaatccgatgaccattcccattctccgcatcgccattctcctcagccgcgaagttccttggtgaattccacaatcgagcgatcctcgatggcttgccagtcccagctgataccgagaccgggctcgcggggcgcgatcgcgcgaccgtccttgatctccatgcccttggtggttagctgatcgagctgcgggatatactcgacatatttcccgttctgcaccgcgcagaccaggctgacgtgcaactccatcaggaaatgcgggcaaacgggaatatcgaaggcttccgcggcgtgggcgaccttgagccatggcgtgatgccaccgatgcgggcgacatcgacctggacgatcgagcaggcgcccttttgcatgtattcgcgaaaatggcggatcgaatagatcgattcccccacggcaatgggcgtggcggtcgaacgagaaaggcggacatgcccgtcgagatcatcggctgggagcggttcctcgatccaggcgagatcaaggtccttcaggcgcgccgcgcgccttatgacttcgtcgaccatgaagccctgattgcagtcggtcatgatctcgaagtcatcacccaccgctgctcgtacagccgagaggcgggcgtaatcctcggcgccatgcggcttgccgattttcaccttggaaccggaaaagcccttcgacttcgccaggagcgcgtcctcgaccagcgcttgcttttctatatgcagccagccaccttccgtcgtgtagagggggcaactatccttggcgccgcccgccagcttccagagcggcagtccttgcttccttgccctgaggtcccacaaggcggtatcgacggcggcgagcgccaaggcagttatcgcgccaatcgtcgtcgcgtgggtggaaaattccatcttgcgccagatcgcctcgatgcaatcggcatcctccccgatcagaagcggaacgaggtgatcccataagaggcgcatgatcgatgacccgccggtgccgatcgtgtagctgtagccgatgccggtcacgccgtcggcgtcggtgattgtgacgatcggcgtttcctgactgacgaagctctgtatggcgtcggttcgcttgaccttcggtgccaggtcaaccatgcggatttcaattttctcgatacgtgccatgacttgtgcttaccctcggattgccaggctcttgccgctgtccgcgtcgaacagatgtgcctgtgaaagatcaaagctcatcttgatttgctcgccggaagccagggtccggggattgagcatgcgcgccacccactcgcgaccagcgaattcgacgaagacaagcgtctcgtttccaagcggctcggtgatggtgacggggagactagcttcgtgaacttccgccgcgtttcccgaaaccagaccgtgacccgtcgggaatagatcgtcggggcgcaggccgagcgtcaccttccggccttgcgtgaccgcggtcttgaactttgcgggcaatggcagacggtcgccattggcaaagacgacatggccgtcattaatcgtgccatccaggatgttcatcggcggagagccgataaagccggcgacgaaacgcgacgcggggcgcttgaacacgtcgtcgggcgtcccgacctgttcgatatggccgtcacgcatgatgacgatccggtcggcgagcgtcatcgcctcgacctggtcgtgggtgacatagatgaccgtcgcctgcaccttggcgtgcaacttcttgatttcagtgcgcatctgcgtgcgcagtttcgcgtcgaggttcgacagcggctcgtcgaacaggaagacgtcgggatttcgcacgatggcccggcccatggcgacgcgctggcgctggccacccgacagctgcgcggggcgcctgtccatcagggtttcgaggctgaggatcgcggcggcctcgttgacgcgctgatcgatttccggctgctccaccttggcgatcttcagcgagaagcccatgttctcgcgcacgctcatatgcggatagagcgcgtaggactggaagaccatcgagatgttgcggtcacgcggcggcagatcattgacgaggcgaccgccgatttcgatgtcaccacctgaaatcggctcgaggccggccaccatgcgcagcgtcgttgacttgccgcatccagatggaccgacgagcgcgacgaattccttgtcggcgatatcaagatcgataccgtggacgatttcgagcgcgccgtagcgcttgacgagtttcttgagggagacctgagccatgggatatcaacctttgaccgcgccgaatgtcaggccggatacgagatgcttttggatgatgaaggtgagcgccagcgccggaacgatcatcaccaccgccagggcgcacatgccgcgccagtcgatcgtgaactcggcggtatagtcaaggagaccgaccggcaaggttttcgagttcaccgaccgcgtcagctgagaggcaagggcatattcgttccagcaggtgaggaaggcaaagatgccggctgacgcgataccgggacctgccagcggaaactcaaccttccagaaggcctgccagcgcgtgcatccgtcgatttgcgcggcttcggcgaggtccttgggaacctgacggaagaagccgtcgatcagccagatggtgaacggcacattgagggccacataggtcaggatgagcccgaaatgcgtatcgatgatgccaatgcgcgagtagaggatgaagagcgggagcgacagggcaatccctgggaccgagcgcgtcagcatcaggccgagaaacgtcgaggacttgcccgcgaacttgaagcgcgcgaacgcgtagccgccggacataccgatcgcgagcgcgataaccgtcgaggtaatcgagatgatcagcgagttgcggaagtaatcccagattggaatcccgcccttgccgatgccggagaacatcgctcggtaggcatcgagcgacagttcattcgggatccagacgggaggcttggccatgatttcgaccgggggtcgcagcgagctgagcacgatccaaaagcccggcaggcagatgacgagcatcgccaggaacagaccgagcaaataaaggacacggccgatacgtcgacgaaggcgttgttggctattgctatccatgactaccactccgcgccgatctgggtgcgggcaagggccagcttccgaaagaaatagacggtgaaggcgatcgacaagatgatcgagacgtaggccatggcgtttgcgagccccatctgagcatcggcgtaggcggtgcgtccgaccagcgtccacaacagctcggttcgccgtgccgggccgccatccgtcatgatcttgacgatgtcataggcacgcgcgacgtcgagcgagcggatcgtcatggcgatgaaggcaaagggcatgagaaacggccaaatgacgtagcggaacgtttgccagggcgtgcagccgtcgacgcgggcggcttccacgggttcttgcggcatggccaggagaccggacaggatgaggatcgcgaagaccgcggtggacgaccagacctcggcgacaacgatcgaaaaaagcgcgaggttgccgtcaatcaaccacgggatcgcggtgtcggtcagtccgagcgcctgaagcgcgttgttgatcaggccgacattgtcattgaacatgaacttgaactggaagccgacgagcaccggggaaaacatcatcggaaacatcatgagcgtgcgcagcaagcgctggcccatggttgcccggttgacgagaagcgccagcccaaggccgagcagcatttccagattgagcgcgatcgtcagcagcaccacggtgcgaacgaacgccgcgagaaagaccggatcggtcaggatgcggacgtagttgcgcaggccgacgaagacgaagagcgtctgcggtcgggtcaggcgaaacggcgtgaaactggaataaagagacagcagcaggggcaccaggaccacggccgcgagaacaatgatggccggcaggagcaggaaaatgggtgtcggaatttttttgaacatcgaacgacctgtccacgccatatcgggcgcctggactgcgagagggagcctcggcgggctccgttcctccaaaatggggcccgcacccattcgcgaatgcgggaccctccatgacgggattaaagcgcgccggcgtccttgaggatgttggtcgccttgtcggccgcggcgtcgagagcctccttggaggtcttgtcgccgaggatcgccgactgcagttccggatagaccgcgttggagatctcgatccatccaggcgtgcgcgggaccgggaaggcatgtttcatggcttcctggaaggcgccaagagcttccttcttgtaaggatcgctcgcggcctgttgaatatcccactcccagaccgccttgcgggtcggcaaggtccccgtcgcggcctcgatcttctgggaatcctcgttggtgaggaaccagacgagcgacgcggccgcgtccttgtgcccgcaggcttcggtgaccgagaagccgtggtgaccggaccaaccagtccgcttgccggacgagccggcgggctgaacgatgacgccgacattgccggcgatcttggagttcttcggatcgttgaagtaggaggcccagccaggccagtcgagatcaagagcgacggtacccgacgcgaagccggcaccaaggtcatcccagaggtaattggtggttccgaccggcaccgccttggccttgtacatgttcacgaaccagtcgagggcgcgtacaccagcttcggagttgaaggtcggctttccgtccttgtcgaggtattcaccgccctcggcgaccagcatttcgaagaagcgaccattgatcgcctcttccttgccggggaactgcgtgccgaagaaattcggcggattggagaagaagattgcctgatcggacacctgcttccaggtatccggcggggccaggtcgtagccgtatttttccttgaaggccttcttcttggcttcgtcggtgtagaggctcttttggtaatacatcgccgacacatcgaactgcgcgcgcggcagcatgaccagcttgtcatcgatcgttgacgccgagatcgtggaatcgacgaacttggcgatttcctcggcgggaagaagcggcttcaagtcggtatagaggccctcatagataggcgcgaaggacgagtggttcgagccaacgcaccacttgatgtcgcccgaggccaggtccgatttcatttccttgtcgagctcgaagtagttcttcttcgacaggacattgaccttggcgcccgtcgccttctcccattcggcgatgcgcgcgtagagcggctcatactgctggccgccgatcagcttggcatcgatcgtcacgccttcgaacttgcccggcaaatcggcggcattggcaaccgacgcaagcagcgaaatcccagccgcgaggctggcaaccaactttctcatattcctctcctccacaacgacgatccctccaggaaagtcggctcctcacatatgagttttattttcatatacaaacggcaataaagcgccagcgtcaagtggaactttcccttctcgaaaccgagatctgcgtatatgcaaatcttattcataggagaccgtacatggaaaacgatgacgcagaccgttaccgcgcaccggcgctcgacaagggtctcgacattttggaactattggcgagcgtcgaggacgggctgtcacagacggagatcgccaaacggctcgaccgcagcgcgaacgaattttatcgcatgctcgatcgactggtgcgtcgcggctatgtcgccaagctcgagggcgaccgcttcgcgctgacgctcaagctctttggcctttcacagttgcatgcaccgacaaggcgtctcgcctccttcgcgacgcccctcatgcgtgagctcgcccaaaagacccgccaggccaaccatctcgcggtcttcgatcgcggtaacgccgttgtcatcgcgcagcaggaagcgcctgactattgggggatctcgatcagggtcggctcgcatgtgaacctcttcgacaccggctccggccatgtgcttctggcgttcagggataaagacgagcgcgagctgatgatctccgagcacgtgcgaagccgtgacgacatctgtctctccgaggatttttatgagcgcctcgaccagatacgagcgcagggttacgagatgatgccgagcgcccagacggccggtgtctacaacctctccgcgcccgtgcttggggccgatgggacatgcatggcggcgctcacctgcccctatatcgcattggtcaacgcgcccggggccccggatatcacgcgcacgatcgcgcacctgcaaaaaaccgccaagcagctttctatcctggtcggatcagacgagattgcgaaatcgcagccgtcttcataaatgaatcttttattctgagttgggtaggcgcgaccgcgcgcgcattgaagcccatccgtattgatcgctaatgatccgcggtcagggaagcaaggaggagaaatcaggcggacccgcggttcggactgagcctaaacattccaatcgcggtagtgacggcgatcccaatcgcgcgcccgccgatcggcttcacgatgatagcggtcccgatagtattgacgctcggcgcgctcagggtttttggtgcatcgccacggctcgcggtggcagacgtttgcgtcaccgccaagcaagctgtcctgccccttgccgttcacattaaaggcgaatgcgggagctgcgatcagcaacgacaggccgtaggctgcaatatggttcttcatcaaacacatctttcatccgcgttgctaagtgggcgtgttcactcactcgccccgcatcaccggaataactggtttcgagaccaactgttccattgcaggcaacagccagcctcgcatcgagagtcagaagcaaagactgggacacggcatgttagacatgcgaccgtgtccgcggaactgccgaaaggcacggacttggcttgcggagtgcaggcgcgaacgatcagattgtcttgctgacgtggcgttcacgcccatagaccgaaaccagcgcgacgatgatgacaccgagcgctgcctgcaccgctgacggttggaagcctagaccgatgagaagcgtgttgatttccgtcagcaccaatgccccggcgattgttccgagatagctcccctgcccgccgatcaatgccgcaccaccgaccaccacggccgcgatcgtctggaaaagatagggctggcctacatcgccgtaggccgaccccgtaaatccgagcaacaagacgccagttactgccgaaaacaaggcactgatggcgaaggtcacggcccacatgccgacaggattgatcaaggccagcggcgcggcgccagggttgctgccaagggcgtaaagcctgcggccatacggcgtgcgagccagtatcaacgcgacgatcgcggcgaggacggccacgcacgggaccacccacggcaaaggcaacggcccagcacttcccccgatcgagacgaagtcagaaatcgcccgcggcgccgaccccgacggaaagccggctgtccaaaacaagacagcaccctggaccaccatgccagttccgagcgtcacgatcagcggatggatgttcagactacgggatacaaagccgttgaatgcgccaatcagtaaggcgatcagcgcgacgatcaggcagacgatcgcgaaattccattgctgcccatagagttgggccgccaccacgttggcgaagccgatcacgaagggtatcgacagatcgatgccgcctaggatgacgacaagggtctggccgatgcatgcaatcgccaacagcgatgcgagcacaagcagcgcgcggatcgcgaaaggctgcgaataaccgggaatgagtatcgtgccgatcacgtgcagcaggatgacgatcgcaaaggcgccgattgcccggccagtcgtccccctcaagagtttggtcgtcatcatcgggcgcgcgctcccttggcgctcttttcctgaagcgcggtcagcacgacggcggcaaccaggatcgcgccatatgcgatttgaaggacgtaggttgagacgttgaaggcggtcagcgcgctttgcagcaagaagatatcgatcgcaccgatcgccgctcccgcaaggccgccgcgcccaccggcaaggctgacgccgccaagagcgaccgatgcgatggcaatcaaggtataactggcgccaatattcgggtccgccgacccgatcagtgccgttagcatcagaccagcgatcgcggcgaagagaccggtgatcaggtaggcaatgaaccgaactttcgtgaccggcaccccggcggtataggcagcgcgatcgtcgctgccaaccgccatcaagaggtcgtagtaaggaagcttcttgataagcagccagcaaatcgcaacggatgcaaggggcaggatcgaccagctcgccgacatggccttcaaccaaccaggggctggaccgacaggcgaaggcacgattgtcagcgtcaccccgccgagcaccagataggtgccaagcgtcgcgacgatgggctggatgcgcacgacggtcgccagaaagccgttgatggcgccgatcgcaaggcccgcgaggagtgccgcgggtatcacgacggcgggcgatgatatgcccattgtgagaaagagcacctggatgacgatcgcgttgacgaaacccatggcgggtccgacggagatatcgataccaccgcgcccggccaggatcacgggcgccgatgccagcgacgcgccgatgagcggcgccgcgagcccgatcagcgttccccaattggctggagcaaagcgggtcggattgaggatcaggttcaatgccagcagcagaacgaagagaacgcccgcgaaaccggcgttcctgacgagatcggcaagaccaaaaaagcgggcgcccatatcaagcggcctttccaaacatcgccgagataacgttcccggccgtcatttcagcaccggccatctcggccgagatttcatgctcgcgaaacaccagcaaccgaccacaaagaaggaggatctcctcgatctcactcgacaggatcaccaatgtcatgccgtccgccgcgagctcacgaaagacgccgtagagcacgtggcgggtggcgacatcgacaccccgggtcggatcgttcaggagcagtacgtcggggcgaagcgccagggctcgcgcgagaagtaccttctgctgattgccgcctgacagcgtggtgatcggggcgtcgagatccggaaccttgatcgaaagtttctggcgataggtctcaaaacggtcgcgacgcctggccgctgtaatcagcccggcagtcgtgtccttccagacggtcgcgatcgcgaaattgtcgagcacggacatggatgggaagatcccggtcgcccgccgatcgcggggcaaataggctatcccgttggcgacggcgtggcgaaaacctcgcagcggcttgccttggccttggcgcgagacggagacctgtccacttgccggcgtcacgagacccgcgagtgcttccaggaatatctgctgcccatggccgtccagtccggcgagaccgacgatttcgccagccttgaacgtctggactattggccgggcgccgtctttcagggtgagattgtcgacagtcaaccggagatcagacatggctcaactcctcggccatgcgtggggccatcgcggcgagaaggtcttccgatgaggatatcccagcctcctcggtgcgaacgacacgcccgcccctgaggatcgatatcctgtcggagagcgccttgacctcgtccatcctgtgcgtgatgaagatcagcaggcttccggcatcagccatttctcgcatcaggcgaaaggcggattggcggtcgccaaaatcaagggcggccgtcacctcgtcgaggataaggacgcgtgggcgccgcacgacggcgcgcgccaggacgacgagctgctgggcggcgagaggaagcgatccggccggcgcgtcgagcggaatgtccgtgacggcaaagcggctgagcgcgttggcggcggtctcgcgccggctgtcgcgcgccacgccgcgcgtccacaagccatcgagcccaagcaggatattgtcggtcacgtttcgatcaggcgcgatcaggatttcctgaaacacagtggcgaaacccgcgcgttggaagccggctgggttactggcggcgaagcgcgcgccgtcaagcctgacgacgccttcatcctgggcaacgatgcccgagaggatcttgacgagcgtgctcttgcccgacccgttttcgccgaggatcgtatgtatggttccggcacgaaacgagaccgtcgcgtccgacagggcgacagtctctccgtatcgttttgataggccttcgatttctagcatgtatccgatccggggtggccgcggtcatggaccgcggcccgtcaatcttacttggcgcaggcgtccggcgtcttggcgtagtcccatcccggcgttggcttggcgccatcgaaataggcgttgaggagatcctccggcattggatccgtcggcggcacggggaagatcgacaccgcatcgggcgtcatgcagtctttataccagttcggaagatcggcattgtggacggcggggatggggatcatcagcgtgttcagcttcggcttttgcccgtcgagcatgcgcacgcccactctaaagagcgtctgcgcggtccaatgtggcaacaatgcatggccctcgaacttgtacttgtcggggttggccttccagtatccaagcgcatcgcctgtcagggatccggtgatgagtggtgccgggcgaccggcctgcgcgaatgcctcggcgacgacgcggctttcgctgcccgtcgtccacacagcatcgaccggcgccggattggtggcaatcgcctggagcacgaccgtcttcgtgacgtttgccgtccagttgccgttcaccgagcgagcaaccttcaggttcctgtcctcggcgagagccttgtcggcgccctgacgttcctgagcgacaatcggatgaccggcgatcccttccaccatcagcaggttaccgcccttcggaagcgcctggttaatggccgtcaccatgtcatagccccatcgggcatagttggaatcgacattgatcgcgttttggctcgtcaccgagccggccgcggtgacgaaggggatttttgccgcggccgccgcgtccaccgcgtcgtcgagagcggtcgcggagcccgggatcgaggtgatgatcgagcaacccttgtcgatgaaggcgcggatctggttgatctgctggctaacgtcattgttggaatcggagacctcgaagctggagacgctgccatcggcgatcaacccgtcgacgaggcgtttcagctccttggtgacggtgacgcgccagggatttccctggtaggattccgaatggcaccatttccaaggcttggccggtggcgtccaactgccccaagccgatgggccgaccttttgtggcgcgccctcatactgcgccttcaagagatcgggcaggcccgacacgacagtgctcacatcgctttgcgccatggctggcaggcccaaagccgccagactcgcgcccgccagcaagctgcagatgctctttctcatttcactcctccttatggcgcctggttcctcccgcgcccgattcaaaagctgttggcaaacatcctgttgagatcggcgaccacccgcggtgccgcttctccatccttgaggcccttattgatgcggccggatgcctgctgctgaaacgccatgtagccgttgtgccgcggccgcacccaggcgccatcgagggtggcgcgggtcgcgcgataaaactccgaagcgttccggttgacgtcatcgtcctcccaggcggcggaatgaccgggctgcccaccggccgtggcatacagtccgcgctggattgggccgctcgcgatccaataggcgaaatcgattgcctctttcgggttcctggagaaggccgaaaccgcgataccggtgcccccgagcgccgatccaattgggccatggctgccagcgacggggatatcggcaaaccgcaccaaccggtcgcggaagcccgtgttcgaatagctgacatatccatagataaggggcgcgcagacgatgcggctgtcggctgatgacatctcctcgaaaacggcaatcgggtccatctcgaaacaggcgggatcgacgagcgatgcgatctcgcgcatcatctcgaaggtctgggctccagcgtcaggttcaatcaagtgaccaggctcgacgcgacaggcatgtccgccattggcggaaagcgtgtaaaacgtcatcagcgtgtgtggagggcgaagcggcagcaagacccgcccttcccttgcgagcgagatgacctccgcccaggtggtggcgggcttggccaattcgtccggccggtatgcctgtacctgcgtcgccgcgtcgatcggaaagccccactggcggccatcggcattgtagctcgggtaggacgcaccgacgctgccggccgcgagcgctttccgctcatcggcgcgctccgtcacatcaagtggcagcaggcatttctcatgggtgatctgtccgacatgcggatgatcgatgacgatcaggtcgtaggcgcgcgccaactcttcgacgggataggcctcgaagtcctgcagggagcgcttttcccagtgtacggcaatgcctgtctccgtgtgaaacagttcagagcaggcgaccatgggatcgtagccacgcggatggctccatgtcatgcccttcaacgtcaccttgctcatagtccaaactcctcgcggatcgccgcgctatgctcgccgacgcggggcgccgcgcgatcgaacttcggacgattgccatcgacacgaaggggcgagcgcgtggtgaggatcgatacgtcatcgtcacgggtgacggtctgcagcatgtcgagggacttgaagccgtcgctttccataagttcgtgccagttcaagaccttggcgcaccagatatcggccggctctaggatggccagccattcgtcggtcgtgcgggtcgcgatcttattggcgatgagctccttgatccggtcacgatcacggaaccagctcgagggatcgtcgcgatatggatcgagctcaggcatgccaaggagatcggcgagcttgggtatcggggtcatggcgatcgagaggtacccgtcgctggcggcatagacgccgtagggcgcggaaagataagcgtgggcgctgcggaaattggatcgccttggcagacgcttgccatcgttgagatgggtggtcagcacctcgaactggaagtcgaccagcgcctccatcaagcttgtctcaacgagacttcccttgcccgtcacgccccggcgcacgagtgccgccaaaatgccctgacaagcggcggcacccgccaacatgtcgccaatcgccaggccgaagggaacaggaccctgatcctcgtcaccattgagccacatgacgcctgagcgcgattgcgcaagcagatcctggcctggtcgcttgacccacggaccctcgtcgccatagccgctgatcgatgcgtagacgagacgcgggttcagagccttgacggcgtcatagtgaaggccgagccgctcgatgacgccaggccggaaattctggataaccacatccgcgctctgaagcaatgtccttaatgctttcagatcactctcgtttttaaggtcgatcgctaggctttcctttgcgcggttgatggcgtggaagatcgtcgagtcaccgccgatttccgtgtcgctgagataaagacgccgcgacaggtcaccgccatcgggacgctcgatcttgatcacccgggcgccaagatccatcagccggagcgagcaatacgggccggataggaactggctcatgtcgacgaccacgaggccgctgagggggagatcgttcgcttgcgtcattgcagattacttttccgtcttgccggcgaaatcggccgggttcttgtacttcacggtttggaggtgctcgcagtagagaacgagttcgccctcgcccttgaagacttcatagcttgccctgatcaggccgagttcctggtagcgagggcgtttgtcgaggttggtacggatcgtgtagatcgtgtcgccgatgaagaccggcttgatgaagcgcagcctgtcatagccatatgaaaaggcattgacgcagttggtcgcgaccaggccaagcccagcggaaaagacgaaggcgccggcgaccaggcgccgaccgaacacgccctcgctttcagcaaatatctgatcctgcacgtagggatgaatgtcggtcaccagcacattgaagagatggctgtcgctctcgccaatcgtgcggcgcagcgagcggatcttctgtccctcgggccagtcctcgtaaaaccagttttcggcgttccacaccggcagatcggcatgctcacgcggcatgtcgcatggatgcgtggacgaaatcccgacggtcggctcctggcccacaacgatgccctccccggcaacgaaatttcttatgtgaatatcactttcacatatgcatcatctttgcaagtccattcgattatgcgatcagtgagacgaagcatggacggaacgggaggccgaatatgagcgaagcgtattttcttttcatcggatcctgtaaccgcaagacgccctacttcgcgtcggccaacggcgccggtgtgagcgtctattggttcgaggaggagacactggaggcaacgaaagtcaccgaatattccgacatcgacaatcccacctacttatcggtgagctccaacggaaaggcggtctacgccaattccgagatctttggttggcgggagggacttgtcaccgcgctatcgttcgatagcaattccggcgccttggattatcggaacatgcagccagcgcgcggcagcatcaccgctcacaatgtcgtctcgcgagacggcaagaagctgatggtcgtgaactacggcatgggcgacggcgggcccgaccaatctctggtcgcatttccattcacagacgaagatggtctttatccgcctagcgcatccatacgtcagatcggccaaggacccgacactgcccggcaggaacgcagccacgcccacagtgtggtggaggtgagcgacaatctattcgtggtggccgatctcggctgcgacacactgacaagctatcgattggcgggcgatcaactcctccgtctctcgcaaacgcggtgtgaggccggtgccggacctcgacacacggcccttcacccgaacgggcgttttctgtatgcgctgaatgaacttaactcgacttgctcaagttttgccgtggatgccggttcaggggcgctgacaccgatcagatcgataaaagcacttccggaaacccacggaaaccattgttccgatatccaaatctcgctcgacggtcgtttcctttacggtggaaatcgtgggcatgacagcatttcggtgttcaagacgctcggcaatggcgaagtcgaactcctctcaagcgtgccctgtggcggcaagacaccgcgcaacctcgcgctttcaccatctggtcgtcatcttttttgcgccaaccaggattccgaccggatttcggtgttcgaacgaaatggcgaaaccgggcaactgcgcgataccggggtcgtcatagaaaccggcacgccaacctgcatcaagacatcggcggcctgacgcgcatcatattcacgcttaaccacgacacgaatcgcaagccgagttgccctaattgaacaggtcacgggaataatgatcagtgccgaacccggcgaccaagccgaagcggtcggctgcagaacttcttccttggacacggccatgcgcctcatccttcacggcacccacttgtctgaattccgtaccaacgccgggttcggccatgaagcacgcgtacctcgcgcacgaccgagcatagccaacatggcgtctcggatgcccttcgacatccctcgcggacaatttaaacggggccattctcaaaattcctgcttataggttgcattacgccttgatcatgttcgcacgtgtcagtaccggagcaatactccccattagtgccgtttgaatcttccccaggtgctgcggccgctggtcttccggggcgcgccccggaagaccagcggcgcgtcatcgccgatactccttccgatggtcggaagggggacattggtgatcaagctgagggagacgatcatgatcctggatctgcatcagcaggggctgacggtgtcggctatttccagagaaacaggcatcgatcgcaagacggtgcgcaaatacattgaacgaggccttcaggctccggcttatggaccgagaaagcctcgcgcgacggttatcgatccgttcgcttcatacctgcgggagcgggtgaaggcctatcccggtctcactggcagtcggttactccgagaactccgggatcgaggttatgccggcggttacaccgccgtcacagactttcttcgtgacgtgcgacctccggcaaatccaggtttcgaagttcgcttcgagacgccgccaggcgaacaggcccaagtcgactttgcccagttccatgtcgttttcaccgatgagccaatgacaccaaggatcgtctggttgttctcgatggtgttgggacacagtcgcctcatctgggctcgcttcgtcatgcaccagaacctgccgaccgtcctacgttgccacatcgccgctttcgaggcgattggtggtgcgccgcgggaggtgctctacgaccggatgaagactgccgttatcggcgaaggtcagacggagggcatcatctacaaccgcgctctcatcgatctggcccgccattatggcttccatcctaaggcgtgcaaggcctaccgagccaagacaaaaggcaaggttgagcggccgtttcggtatatccgagaagacttcttcctcgctcggtcgttccgcaatctcgacgacatgaacgcccagctccggcactggctcgacaccgtcgccaatccaaggaagcacgcgacgacccaacgtgtcgtcaacgaggccttcgccgaggagcggccgtatctgcggccgctacccctggcaccgttcaagtccgttctaaagctggagcgccgcgtatcgcgggaaggcatggtcagcgtcggcggcaacacctacagcgttccggatgcgacccgcagtcgaacggtagaggttcattcgcttgccgacgaggtccgcatcttcgagaacggcactctgatcgcggctcatcctgtcctggagggccgtaaacaacgccggattcatcctgatcaccgacgagcaatcacgacgcaacactggccacaaacacgaggcgaagcccttgtcgtcaaacccgccggcgacaccgtgctgcagcggtctctcgccttctatgacgccgtcggcaaggtcttggcaaaggagaaccgcccatgagtgcaacactcgatgccgtaccatccatgatcgaccgtattcgccatgacctggtggggctgaagatgccgcgcgcactggaggcgcttgaccatgttgtgcgacgcctcgaacacggcgagctgtctgcccttgaagcgatcgatatccttctttccgaggagttgaccctgcgcgagaacagccgcatcaagacggcgctacgaatgggcaggcttgcgacgatcaagacactcgttggtttcgacttcaccttccagccttcgcttgaccgcgatcgcatcttcaccctggcgcagcttggcttcgtcgatcgacacgaggccgtgcatttcctcggcccacctggaaccggcaaaagtcatcttgccacggcgctcggcgtcgaagccgtaaaagctggaaagagcgtctacttcacgaaccttgccgacctcataggttcgttggcccgttcagaacgagagggtcgacttcaggagcgcattcgcttcttctgcaggccaagcctgctcatcgtcgatgagatcggatatctgccggtcgtccagggtggcggcaatctgttcttccaactcgtgaacgcccgatatgaaagaggggcgatgatcctgacgtcaaaccgaggcttcgctgagtggggcgatgtttttggcgatcctgtcgtcgcaaccgcgctgctcgacagactgcttcatcacgccgtcgtcgtgcaaatcgagggatcgagttaccggttgcggcagcatgccgaactcatgccggagcacgttcgatccaaagcccttatagcgcccccggcattcgcaccacctcaaaagccacgcggccggccgccgaaaaatccgcaatacgccctgtcgtccacgtcggcataagtggggaattttacttcggcacaactggggaaaattcacccggcattgacagcacgtttaggtaggcacgcgcttcgaattgaaatggcagatcagcataaaagatgaacttactctacaagtgcctcgattttttcagtgcatcgagatcaaagtaccgaaatcaccttgtccccttcccgacccaaccagacatagccttgccccaagcggtggcgggcacgatcgtggcgttttacaccaggaattccctatatgagctcgaagcgagacgaatggtgtcgtcggcaaggcgcctcggtctctctgtcaagacgactgctgtcgacagcgccggcagctgggtaagaaacgcatcgctgaaagcggcatttcttcttgaggctcgtcagcagcatcgcggaccgcttctctatgtcgacgtggatgccgtcttccaccgcaacccttggccacagctaggtcggtatgagtgcgacatcgctctataccgagaaaacggtcgactgctttcggggacgatactattgaacgacacgcctcggacactgcgtctgttggaagagtggaagaagcgatccgacaccaaccccgaaatctgggaccaagtcgttcttcaggagatcctcgatcaggatcaggctcttgaaaccagtgcctataacgttgagggacttcccgccactttctgctggatctttgaccgccttacgaacgttagggacgaccacgtcttcattgagcatttacaagcaagccgacaagcaaaaggtgcggagaaacgaggacggaacaagagcctggagcgccgtgcggcgcgggttgagaccatcgaaaaaatactcgccgtcgacgaagttggctaaggcacttcctttcgtccatacgtttcaacgtaaagaaggcatgctgaaacctccaacagttcggaccaattcttatgtttgcaagttttacagccgaggacgggaatagcgctgtcgctgtccgcatcaacccggagcacgtagcctctgtactcgaaatacaatctgatcgaacgaaaatcacgctgtccggcggcacggatcatatcgtggcacatccacttgatgttgtcgtccgtcgcctccaggaagctctaggaccggtcgcgatatagagcgaggccaaagatttggcattaaaaaaacgcgcactgatcgatgctaaatcagccgaacaaggtctggcgcaccacgtcggccttcgcactgatgtaggatcggcgcgtctccttgttgctaaaaattctccttcccggacatttccgcgaggaagccgcctcacgcagcctcctcttcgtcgctgtcctcacaggtggtgcggggctgcaggtgatgcaggtagtcagctgcgcgttgcgcatgggcagcggcttgaaagatggcgcgcttgtcgccacggagcacgttcagccatccgtcgatatagcttgcatggtctggcctcggctcaagctcaggcgtgctgccgaaatcggcgcagaggaacgcactgccaagttcggcaatatatcctgacagtcaagcgacaaacgcagctacagaccgaggatggcaacgctaacccatcagcgatttacaaaatcgatgggttgatacggtgaacctccgatttatcccgcttggaacccagagggtatcctcgaacgtctggataaggctccagccttgtcgttggtaaaagcgttcagctcggatgtttcctgccgtacagaaaagctccgcttcgcgcacgccgtcttgccgcaaaagtccttcggcgaaattcaacagggcagatccgacgccgctgccgcgggctccgggagcaaggtagagcttaactacctcagagccctttatagatacaaagcccatcagctctttgcccgaaaaggccagataaaacgtatctggtgcttgctctaaccaagaaacaaaatggcttttgccccgaaaagccaaaacctctggtggaaccagcaaggaatgagcgtcatgccagccttggtgccaaagctgaactatcgcttctttatcaccggaagctgctcgccgaatttccagcatggcgttcatgaatgccttccctccatcggcaaccctctccagaaccgcggtcggcttgaagcggacattcaatgccccctaaaattgaatgacctgacgtagggttgcgatcgtttccgaaaccgacggccctttaataggtggcggatcagctcgttcgcagaactcccgccagacgaaaaatgttagctcggcgccatcagtcggagtctcaccaggcccgtctgaaaactgtttgagcattcggtagcggtcatctttccaaaaaagatcttcaacccactcatagatcgggattgcgtgaaaatggatcggatatcctggtgagtgcccgtagcgaccgatgtagacccgtcgggcaccgagtgcttgcagcgcacgctgcacctttgcgaataccgtacccatcaagcctagtgcttcggcagacagatcactcagatcattcgtcgcttgtgtcgaagcaatcatgaggtacccaggaagcgccgaattgatgcgatggttcactgaccagtcagacgtctgggctatgtgatattgcggaggaatgccatggaggttgctcatcgctgcactttatcaggcacaattgccatcgcaattactggtttggcgcaatcgggtcgaggtgacaccgcctcgaccctgtcgcggtgccttattgcagcctcgcacgatgtgcagctgccctacggggcaaagtagcattgatcacgctgccatctcttcgatatgaggttggcacgcatgcatccagtcggccgcctgctgcgctttgctggcggctgtaaagatcgcctttggatcatccttcagcaccttgagccacgaggcgacataagctgcatgatcgggccgcggatgatgggcaatgccgagatcggcgaggacgagaccactgaggatctcgacacagcactcttcggcggcataggcggctgatccgaaccggcctgaaagatcgcggtcgatccgatgctttgcgccgctggcgtgaccgttctcatgtagccagacgccataaaacgatgcgggatcacgaaacgaggcgaagtccggcatgatcaccgtatcctcggcggggcgatagtaggcttcggatccaccgaatacggtcttgatgccgagattggcgatgaacgcctccgcgtgagccagccgttcgctctcgggcaggaccggaactagcggacgctcgtagccatccacctgggcgacgttgaagacggagaacgcacgagcgaacatccgccggtggccatcgtcgctgtcatcgtcgttgccagccggccgcgacgcctggacctcccgccacaacacgaccgtggtggagcgctcgccttcacgcacctgtgcgccggcctcctgccattgcttgtaggtgccccagagaccatcgctgtagccggcagcaaaaccggcagcccacagggacagcgtgttgatgccacgatagcgcttgccggaaacgacgttggtcggacgagcgatgctcgccccattgtggaaccagggtgcgcgccattcacctgtgccgtcttcgattgcggcgatgatctcggccgtcacccgggaatacacatcggcacggcttgccgagctggacatttgggacatgggggagcctccgtggccagccgggcgagcttctctcgccccttcaaccgaccgtctggttccgaccttcttcttcctcccatgccgacccgaagggcgactttccttggctctttcctgtctcgtcatgacgtttgctccttcttcgccgggacctccccggcggtggagcagccacttgcgatggccaaaggtcgcgcgcgcactcgacgagccgaagcagagcggaggacggcgatgagccgttgcgcgcacgagccggacatcgcgcgctccgacccgccgggcaggacccggccaggcgcaacatctattccctgcgtccgtctcgattcccggaatctatattgtctaggaccgcctccacccgcgcgagatcctggtcgagcgccgcgcgctgcagcggcgacaagcgcttctcgctcagaaggctcttggcttcctgtgcggcccgagcccaggcgggtcgatgcctggtggtgatgcaggcgtttggacagcgcgtcggctggcaaagtgctgtcagcggcgccgtattatcggcactggtcgcctgcttcaggcagacagccgtacccggatcgaagaagcagtcggcaaggatgccgacatgcagcgttcgcgccaggctggcgagcatcgttcgaacgcgcgcacgatcggcaatcatagcggggagtggaccgagttccgccgatattccatcgagcgtcttcgatatgcgcgtggccgccggccccgacagggcagcaccggcctgccgttcatcgaaatagatcaggagatcgtcgatctgcccgaggctgcgttcgttgtcaacctcggcgcgaaagccggatcggctggaaccggcataaccttcgaatgccgccaccgaggcatgcttatactggatcatgccggcgatcgttccgaaggggcggttggcgatatgccacgcgattgttctccggaactgccgtgtcgtgatccgccagggcgcgccatccggcccgttcgggaccgcgggcacatccggcgtgccgaacagctcattaagatggtcacgatagcggttgagctgacggacgatctcggccgataggtgatccttgcaataggacttgcccgccaggacgggccagagtgtcgtgagaccccgggcggacgcggcgcgaaacgacagacgctccaggacatcgatggctttggccaccggctcgatcgtgacccattcggccggctcgccttggctcgatttgcccttgtatgccattgaccggacgcgatggcgcatgatcatgccatcctcgctgcgagcgacgtagaggcatccgcgctgcatcgcctggacttcgcaatcacgcataccgctcagataggcgcagagcatgtaggcagcggcctgaagcatacgctcctcgagcgccagcgtcttggcgtcgaagcgggtgcgccagggagtgccggtctcgggcaagatagcgatcggcgtatccatgccgccggtctcgacgccaagctcacccacggccgcggtgatcagatggggcgcgccgtcacccaactggatatgcatcttggattccgcgaccgcgtcaatgccgatataaagatgcaacaggtgcgagttgacgggcggcgtcacctcaccggtctcaggatgacatagcgtcattccgttgtgagcggttccccagatcggcacgccacgtccttcgcgacgcaggcgatcgaaataatgctggaggcgctgtcgttgacgaatgcggcgttgcttgcgttcgaggtcctgatcggactggatgagtgccgcgcaatgagcctccaatcgctccatctcttcccgtgcggcgaagatgtcggccgcgaacatggtgacgtagcggagcgaccatgacagcaacggcgtgataatctcttccggaatgcgcggcgtcaggttctcgcggacgaaacgatatccagcgacccgggctggtgaccgatcgctccatggctcgaaggataggccggtggacggaagatggtcgcggtaggttcgcaggtcgaatgggatctccaggagctgggcgacgatggcaggtcggcggctacggtcggccttgagatgacgggcatagcggtcgaggattcgctgatcgacccgatgaatatcgacctcacccagctcgtctcgaacgaagtcgaagaaccgtcgcgcacggttgaagacctgccgcacgctgcccggcggaagccttttgcgatggcccggcagatcgacattgagccgggcatagaggaactcgcgcagcgcctcgcgcacgccaacgtggtcgacggactcgaagttgacggtgacatggcagcggcgggcgttctcacgaaacacggccgggccaaggtcccagttcgcatcgccgtagcgtgagagattgcctcgatcgagaccggccttcagcgggacggaggcgagaaccgggcggacattaagttcctgttcatggggagcggtcgcggcacggatcattgtcgagcctctggcgggagataaagcgagtgctgttccgcctcgcggcgagcctcctcgatcgaactgtcgggaaaggccggcaggatctgcgtgacgatgcggtcgtgcgcgcggccgaacttcatcgcccaatcggcggccgacaaccccgaacgctgcgcctcgataaagcgctggaaggcgacgatcgccggcagcttgcgcgcggtgatgacggcgttgcggcattcgaggcaaccccagaacggctgcggacatgatgacccggcctcaccgaacgggctccgatcgaagcccgagcatgcagccaaccagacatcctgttccccgtccaggagagcatcggcactgctgcctcctcccgacacggcgtcgtctcggcgccaggaatcctcatcgtcaggtgccaatatgatcggacctgcggccgcggcggcttcggccaacgcttctgctatggtcgcttcatgaagtggtcgcagagacggaatgtcggcgtagtgacgcgccgcgatctccggcgtgtgcccgaccgcgaaacgagccatgtggccgtccgtcttcagataccagagcgccttgtgggtcttgcgcaagcgggacaaaacgaggcgaagaggctggccatcgtcatcgactatcccgcgacttccagtccatcggtcgaccagttcctgctgatgttcgacacccgcgcgaagctgcttccgccccttataataatagagccagagacagtcgttcgggaggaactgtcgcgtgaatgccgtgacttcgattagcttgcgaatgaggccgcctggcgttccaagcccgccatcacggacgcgaatagttttgtgttcggcgccgcgagcgcgccgcttcagataggcaatctcgacagtacctgggccgggattttgaaggcaatcgatcgtcagtgtcttgcaacactcgatctccagcccggtctccagcgatagaaacgtgaggaggggcggaatatcggcggcgcgcagatggtaaagtgcatggatgtcctcggcgagagatgagaccggcaggcctctccgaagccggatgaagtacaggctcttgaatactcggtccccgctgctgagcctgccgtgggtgaggatcgtcgcatgggccgcggcggtaacgttgcgaaggttctcatcaccttcttcactcggcaggctattgaagcgccggaacagttcgccaatatcggcgcgtgcagcgtcgcgaagctgtcttgcgacaaacgggctataggcatcgcgtggccgtgaccggccggcggactgcgtgctggtatagctgagccggcgacggagtgctgccttgagggtaccaggctggtcggagtcgatcgaacgcaaggccaggatagccttggcgacgacggtgtggcgatggatcggcgtcatcccaccggcttcgaggaagtcctcgtaaccgtcgacgtcggcggcgctcaggtcggtgggcttcatcacctgtgtatgctcgcgtagatatgcgaagaaacgccgataggcgttcatatgctgcttgatcgtgctgcgcgcacccagcgaaccgccgagttcagcctgcctccgaagagcaccggcgaaagcgatcgccaaaggtcgtggctccagatcggtgaaatcgacctccgcaatgccgccatatcgcgcctggatgttgaaccgcagaccgatcaccggatcgctggcatgagcgggagcaacgccatcggccggcgcaaaccggacaggacgccctttccgtggccggtccgtcatagcgaacgctccgaaggaagcagcgacagaagttcctcgaccgctgcatcgacagtatcgccacgcgtggcaatgtgatcgagatagatataggtggttgccaggctggcatggccgaggagccgctggacctgctgcagcgggtcaccgaggatctgccggtatgcctcgatcgggcctgctggcaatccagcatcccgaagccggtgctggatcagcatggccagcatgtgcacggcgaaggtatgccgcagttgatgcggagagatgtcgatcctaaaaccgaaagagctgcatcgcccggatgcgcgggcaaagatcacttcccaggagttcggctggaccggaaatccgacttccgtcagccacagaaccgccggttcagccggagtgccatcgtcgtcgcagaggacgactctgctgcgctcgtcagcgctgagcagatcgagggcaatctcgccgccatcaagggatcgcaatcgtgaaactgtccggtctcggcgaacgaagattggcctctcgaatgattgccaccccgaccgtcgctggaacttcgcggctgcgtgggcgcgctcgacgacaacataggcacgcaactgttcaagcagacggcctggaaccagaatgcggcggccacgatcacccttcgtcaacgcgtccggaagatctagccaaacctgtcgctcagtctgaggatcggggacagcgaggtcggaggcgaacaggaaggacgcctcctccaggcgcagtccggtcgtcacgagaagatcggaaaacaacgcattgcgaatgccgttgcgatcgcgggcgccgggccgcagtccgccttcgggcagatgccctatcagtccgacatcccggaaaatccgatagtcctcaagcgtgacgaagctgacatccgctcggcgcgctgcgggctcgtaggcctcgttgcgcggtgcgacctgcgcacgacgaccgccatgaccctgcctccaaacggaacggtgactgaagggcgcttcagcaatcagaccttcgcgagcgccccatcgatagaggcggtccaggcaagcaacggcgcgattccaggaagcggccgagatgcgctgcccggcctcagtgcggcgacgaacccgatgataggcgacgacgtcgtgacggtcggcatgccataccgtcttcccgcagacctccgcgagaaaacggacccagaccaggacgtcataaccataagcacggagggaatggcgggaacggaccccgttgaggggcagatccagaaagaaccgatccagatcatgatcgtatagcttgccgtcccgaaggatcatcggaacatgggcatcgaggccatgtgctaatcgccgctcctgaatggagatgttcgaaaccgtcgttacattgtccacaagttgttcaaccttcccccggacccccatccggggagccagcatcaacgaaggagttcaacttgcccggcactctccaggccggcctccgccagctatttgggagcgctgcgtccggcctggaaagcgcctccgtcagcgtgtgcatcaacctagacatgacgctgagagtcggtgcagactgtcaagataatgcaataagttcttcgcgggcgcgttccgtccggtccttgccttagcgggatagatcgcggtccagacgagcgggtgtcgaggtccagtgcgtcttatgccgatatcggcataaa

SEQ ID NO: 37 - DNA, 48058 bp, Rhizobium matallidurans
  source 1..48058: mol_type = genomic DNA
aaaatcttctcatcacatgacggccaaggccgaaacaaaagggccgcctaaagcggtcctttctgctttaaggcccatatacagaatgaaacttcgacgcacctgatctataatggtgcgtccctcacaggaacaaaacccaatagggttttgctccggtaggaggcataaccgcttcgcggttaggccgccgcgccattcggcaaagccgaatgcgctggacgcggggtggagcagcccggtagctcgtcaggctcataacctgaaggccgcaggttcaaatcctgcccccgcaaccaatctttccaaacacttagtatttcaatctcctttcgacgcatgcctgcgggcagcgagacgggcagcaatcgaaactttatagcaagtcggtgacaatgtggtcttccgtcaactggagacgttggtccggacgaacgggcttctgtttccccaccagccgggtacgaatgtttcgccccgcaagtgcagcccgcgccacgagctcgttgttttctcggatccaagcatggacctctgaaatagaatagcggttttcaccgcctgtgacaaaaatcgcgggcagtggaaacccgcatgtctttgtatagcggcagagcgtctgtcggcagatcttgagcaggacacacacttctctggtcttatagaagcctattggattgcagaatacatttgtcatagcattcactccagccaaaatctttcctgtccagcgccgcgatccggttgccggaggtgatcatctgcctcttcctgatggtgggtatgtattgcacacgttcgaatagttgtcgagtgggtggcgaaaaaaattctaatgaaatgtgattaaaaggaagataggtattaacataggggcttcagaggtatcaaataccaaattgtcaacaattaggaaataaacgtgcgaatccttgccgatgaggagatgccacccgcacgtcggacttgtgacgtcgcgcgtatttcagtcaccaagatgggacatgcggcgtaaggataaaagcctctacgcaaatcagttgacaaatgtgatgatatgatcataatgaccatatagtgagcatggtgatcactcagacatcaaaacgtatcgttcctaccttgatggtcatcacccttcgacgtcggcgtgggggaatgtcagacgggcaaggagcttgcggcaatcctttaggtgttggcgaaacggaagccacacgaagccgtttcggcaaaggactcgtcgttgcaattcaaccggattccagcgatctgttgggccgcgaaaaagagtacgaatccttcatcgaaagaggccccggatttgtccatgaaacgaagaccggcatcgaaacaccctccaacataaacgctcgagtaccggctatattcttgaaactaaggattcgtaagcatcgcgcgctccggatttaagggcggtcattccaagattcacgctcttgtcgttagaaggacttcatagcgttgacgttccatgcgggcgcggcgcggccgcccaactcatcggcccgaccggcaccagttgttgaattgaaagtggaggtgttgatgaagcgacatgcaagcttccagcgcaagtcggcgtgttgagccgaaataccttggtaactgtgtcgttacggttgcgctcttgctgaaggttcttgctagaggaaacacttatgcggctgtgtcggccatttttcttgggagggcggcaagagtacttcgttggcgcgatggcgtgcaagtccccgaggctcaactccgacccagcggtcgacgagaccggttcttacgtcgacaagttaatttcgaaacttcaacccagttaccggccgttctcgagcctcccgtggtgggctcaactgggtttgtgctgcgtggcggggattccctccggtctaacgcccttggcaacttcgcgttcgaacgatggacgtgtctctactattattggagaaatatgcgatgaagattctaagattcggagagccacacgacaactcgtcctttcgtgcgatccgcgcccgcgtgaaatcgtgtgaggccctttctgccgatctgcgaaccttgatactggaccggaggctgccagatcttgatcccggcagtaccccgatcatcgaacaatgggcgatcgaaaactatatggcaccgatgctcaccggctacatccattaccccggcagcgctgagtgcgtgggttcggagtggcttggctttaccatgccgattgagctgctttcggtggctgagaacgccgcccggtccatgtcgcggtggtaccggctcgggacgccttcgccttgggccgcggacactgtcaaggcctggggcgatccacatgaacgctaagctggaaacagttcgaatagcttcgaacttccccaagaccaggcttcttgaaaccgccaggaagtcgccctcgttgtttctcgcctatgcgtgcatgcgccggtccctccggacccagtacacgctcaggagaggactaccttcgacagtggtcgtagtgataggggccagtgacgccggtgacatctacaaaaaagcgacggagcttcttctgaacgggtggcgggatgcgtgggcgcgaggacccggccgcaagcacgctctggtccgtaatcttgcaagccaggatcgtatgaaaatacaacaaaaacaagtacttgaggaatacgatcggtacgacgtcattgtaattcttgtccgaacccgctctgacatttccgatcagcttgctctgaccgccgatgcggtagttgagatttcacctacgaccccgaggcaaattcatgccctccgccgacttctcggacgacaacctttcgatgacgctactgtagaaatgctgacggaacttgacctgccgattcttgtagcaatcgtcctcaagggccgtttctcccatgttgacgcgctaaatctgctgaagttgtataaaaacaacggtgcctcccaggcacctcgacttgaggatctaccgggctttactgaggtcaaggcatgggcgaattctttcatcgacgatctcggccgttttcggaagggcaagctgtgctggtccgagatggcgcggggcgttctcctccacggaccgccgggaacggggaagacgctcttcgctcgcgcactcgcaacatcggctggactgccgcttattagcacctcggtctcggagtggcaatccgcgggtcatctgggcaatctcctgacggccatgcgcggtacttttgagctggcgcgatcgacgcagccatcgatcgtcttcatcgacgagctcgattccattggcgaccgtagaaccttcacgggtgattacgtccagtacagccgccaagtcgtcaatcaactgctcgagtgcatcgacggcgcgcagggccgcgaccacatcctagtcgttggcgcgacgaatttcccggatgcgatcgatcccgcactgctgcgaagcggccgcatcgagcgtcacatgcgtgtagccctacctgacgtcgaggaaagggccgctatcctgggataccatatgggcatgtcggcagccgccaaggagcttcgggcgattgcagtccatcttgatggctgtagcgccgcagatctggagatgctggctagagaggcgaggtcaaggggtcgacggaacaaccgcgcagtccggctcgtcgatctcgtagagtccttgccgccgctccggcaactgtcggaagacgacgctcgccgcgttgcgacccatgaggccgggcatgcggtcgtcggcctctcgctgtcaccaagctgcaggatcagcattacgctcaggcggtcattccggctgcttgaatcgaataattttgcatggggtttgacgacgtacgagcacgatgaggaaaacctgctaccgacacgccaagactgcgaggacctgatctgcagaaagctggcgggggctgcggcagaagaaatctttacgggcggagcatctatcggctttggaggatgctcgggaagcgatctcgatacggcgtcggaaatggcggcgagaatggtgtgctcctacggcatgggcgaaagcctcaggttcttgattgaatcccatcgggtagatttcaagagggcctccaggctgcccgacgacattcgagatgagatcgctcgcatccttgatgagcaatatgcgcgagcccgttcgattttggtgaaaaacgtgtcgcttctcgatgaactcattggacagcttttggaaaagcagcagctcagcgcgtccgaagttgcgttgatcgcatctacagccatcagatccaccgacctcacgggaggggcactagtcgcgagtttccacgtttcatagctctttagaagaccttagggatcgccgtctcaagcctcgctacaccacgtacgtccctacattggcgaccggcgtgcctctgcgcagcgtgataagcgccgaggatcgcgacgtccagatcaccaccccgaaccatcgcaaagctgtctgcatgatgaggacgtcgacaccggctcgagtgtgaccgctttcttgccagcgttgataagatcctactcttcggtgtctggggcaggggcttcaccgaagtcgaggatatcgttctccgtatgagaaatagcctgccggcccagcgcctgatcctttgcaaccatttctggaaagcggatgcccaggtttaagtatgcgccgccttggattgtcttgcgccgctcgccacccgacctgcgaattcgacagcttgatgtctacacaagcaggtatgcttcgaggtcgctaaaatagtgagaccgatgcttgtttaaaatattgctaaaattatactgtcgctacagttgaacttattcgcttgacaacttacttgtttctggtggagggctgatggcaaaacttactggcgattttaaagactttcttgttgacacggtcaacctgaaccaaactcgtataaacctactggatgagcgggtgaaggcgatccagtccttcctcagagactccgatttcacgcccgcaatctcgacgttcatcgagcatggatcatgggcgcatgacaccattatccgccctgtcgacgggggcgaattcgatgccgacctccttgtccgggttaagaaagtggaaggctggggcgcggctcagtacgtaaaggacttggggcgggtcttccttgatagcagccgctactcggataagacggttgtttgtgattactgcatcacgatcacgtatgccgacgaatgcaagatcgacatcgcgccacttgtaacggaccgagtgaaccagggagatctagaagtctgcaacaagggcagcgaccagttcgaggagtctcagcccgtcgaatatacccgttggatgaggcagcagaacggttattcggggaacaactcttttcgcaaagcgacgagactggtcaaatacatcagggacatcaagaagcgattcagttgcagatcagtcctcctcaccactctgatcggccaaaggatagatcggtttgacaagggttcggacgagtttgaggacactcctaccgccctgcagacgatcatgggtcggctcgacgagtggctgcaggaccgcccggacaaacccgaggtcttgaacccggcattggcgagccaagacttcgctgatctatggaatgacatccaatacgccaatttcagaaatttcgtgcacaagtatcgcggctggatcgatgacgcgatgtcagcggaaacaagagccgaaagcatagaaaaatggcgtagggtcttcggagacgacttcgccaagggagagaatgttaagaagtcagaggcgactgctagccagcaggccctcgccttcctaaaagagggggcggcgcatctagaggatcttgtcgactcggtagtggatttcgggatcaacatcctgcccgcggctttccgaacccccgcacaccttcaacctcctacttgggaacgttcatcctatgtcaccaggagtgtccatatcctggctgggtatagttcgtcgaaatcatcacggggatatcggatcagtacaggcgaagctttgccagcacgcggaggaatctggttcgacgtgcgtgtcaataagtttgaggagttgggacctgaccactatgtacgatggcgaattaccaataccggagccattgcgatggcgctgaaccaaggacgcggaggcttcgaaaaacctcaggatggaaaccgccgctgggaatcgcttcagtaccgtggtgtccacatggcggaagcctttgtaattcggcgaagcgaccatcggctcgtcggttacagcgatccattctacgtcgttgtcagataggggcagcaatggcaaaaatagacacggtcggcgacaactattacaaaccactccggcgcgccgacgcggttgctggatggatattctggatcatatccgggctctcacttggaattctgtttgtagagaaggccgctcagcccgcatttcactcagcgctccagataatctttctggtgctcgcgctgctagtttttattctcggaatggtgcagcggctttacctgtcgcctagagctgaagacaaacggagacagcaatttctttccgatggcttcggggtgtcgctgacgagcgagactacagaaggctactacaacaatggccagaagaatccattcagacgcctcgctgcgaacgcaatggagagcgcatttttcacaggcgagctagttcggataatgctggctacccagcgggcaaaaacggtcgggtaccttgttgtttatgtggtcgcattttcgctacgttccactaaccttgaactgctgacagtggtggcgcaggtgctattcagcgaagacataatttcccggtggcttcgaatggaatggctccgtgtccggagcgaaaaggtatacgaagactccagccgtctctttctcaatcgtgcgacgttctcaggtgttgcagcacaagctcaagctgtcgagcttttcgcactttacgagacgaccaaggcgagggcaggggtagaagtatcgtccaaagtgtttgaggcaaacaactcacgcctgacggaagaatggaatgagcgtcgtgcaacgtcggggctctgattcacgatgacgtcaagcatcgcagaggccttccggcagttccggtcaaatctggaaatcacgacactgcaagaaagtacgacgtcgacgaggcagcagaacgtaagggatgcagttgcgagtgacttcgtcgtactagagacgttccttacaggatcctaccgtcgcaacacgatgatagctcctttaagtcaagccgatatcgacgtcttcgtagtgcttgatcccaaatattacgccagggacaatcaagcgtctctgcttgaagctatcaagaccacgctgcgtaagcgctacccggagactcctagaataaagccggatggtcaagcagtgaccatcaccttcgccgatttcaaagttgacgtcgttcctggcttccatcgaaagggcggcggctaccttatcccggatgcacgcaagaggcgttggatcgagaccgatcccaaacggcatgtcgaactatggactgcttccaacaaggaacatgacggacacttggtgcccctcatcaagatgatgaagtgctggaacagaaccaatggggaactctttagttcattccaccttgaggttttgattcgacaatcgctcaatggcgttacgatcaccgactttccaagtggtgttcggtggttactcgacaatatgcgcggtcgtgtctggacgaagattgccgatcccgcaggctacggggacgatgttgccccgaacatgacaagggtcgaagcagaccggatgatcgcagctatgactagatcacttcgttcagccgtcgcagcggagacatacggaaatcttgggtacgtcaggacggccattgatgagtggaagaacgttttcggtggatactttcctggatgatagatcgcccgtgctcaggtcgtggccgagggagctaaaacccctcggccacgacctgagcgggtcacaaacagcgtgaagttagctcgatccaatatatgatgattctaaaagtggccttcggttgattttgcggccgctgcatttgttgagtatggcggttattccacaccgcttggaacttgtctcgtccgagcctgccgcctgcttaccgtgcgcatcctggagtgcaattcaagtagaggaattcggtctattcggcgatctctcagttgcaattgtcgccaatacttctggaaatccaaaagcctatccgtattcattttttactcaattcacgcttgctatctgctacaagattctcccaccggctcctgcgtggcaaaaggcatttattaggcacgattgtaatggcaaaaaccaaccttgttcgccctagccgcgatggcgatcagtttcattacctctgggcagcgcgacgatgtttgaacctattgtccgccaccagcgacttggtggcagtcactattgagggaatatcaccgacagaatatggtagcggcgaaaccgttagggccggagaagacgttatcgacatcgccgagtacttcggcagcgaggattttgctgacgcacggctcgtgcgttacatgcaactcaagcattcaaccttgcacgcgaatgaaccgtggacggcaagtggactagagaaatcgattacgggcttcgccgagcggtacagggaattgctcaagaccgtttctaaggatgtcctagccggaaagctggagttttggtttgtcacgaatcggccaattggcgatgccttcgctgagaccgtcggagacgttgcgaaagggcgtactgttcgccacatcaaagaagtcaagaagattgagcgcttcgcaggcctttccggcgatgatcttgccgcgttttgtaaccttatacattttgaggggcgacaggatgactattgggatcaacgcaacatcctattccaagatgttgttggctatcttgttggtttccacgcagaactgagccggttaggcagataatttccattgagaactgagccatgtgaaccttccccccaacgcggtgagcgacgggggcaacggagtgatccacatgggacttttaaacatcatccgtcggatggcgctgcgagagaagcagtcaatccgtgagatcagccgacggaccgggctgtcgcgcaacacgatcacaaagtatttgaacgcaggtacaatcgagccgacgttcacggtaccggaacgaccaagcaagcttgatcccttttccgacaaactggcggcctggctgaagacagagaccggaaagtcgcgcaagcagcgccggaccttgaagcagcttcatgccgacttggtggctctcggttttacgggctcgtacaatcgggtggccgcctttgcccgcgagtggcgagctgatcggctacgtgagcagcagacgacgggccgtggcgtattcgttccgctgtctttccgacctggtgaggcattccagttcgattggagtgaggactacgccgtgatcggcggcgagcgcacgaagctccaggtcgcacatatcaaactatctcacagtcgggcttttctggtcagggcctacttgttgcaaacacacgagatgctctttgacgcgcactggcacggcttccgtgtcttcggcggcgtgcctggtcgtggcatttacgataacatgaagacagcggtcgatcgtgtgggtcgcggcaaggagcgacaggtcaacatgcgcttcctcgcgatgacaaaccattacgtctttgcacctgagttctgcaatccagcggccggttgggaaaagggtcaggtcgagaagaacgtccaggatgcccgaccacgcttgtggcaacagatgccagactttccaaatctgatggctttgaatgactggctggagcaacattgccaggagctgtggcgggacacggcgcacggcaccttgcccggttccatcgccgatgttttggccgatgagcgagcagcattgatggcattaccgactgcatttgatggcttcgtcgagcagagtaagcgcgtctcaccaacatgcctgattaccttcgagcggaaccgctacagtgtgcctgcatcatttgcaaaccggcccgtcagcctgcggatatatcccgagcgtctggtcgttgcagccgagggaaacattctatgtgaacacgcgcgggtcatcgagcgcagccacaggctaccccggacaatctatgattggcgacattacttgacggtcatccagcgcaagcccggtgccctgcgcaatggtgctcccttcctggaattgccgtttgcctttcgacaactacaggaccagatgcttcgccgccccggtggtgatcgtgagatggccgatatccttgccctcgtccttcatcacgacgaacaggttgtcgtcagggctgtagaactggctttggatcaaggcgtggcaaccaaaacgcatgtgctgaatcttctgcaccgtctgatcgacggcaagacgaacgacgctcccgacgtcgatacgccacaggcactgaccttgctgcgtgaacccaaggccaatgtagaacgctacgatggcttgcgcgtccggatcgtgggaggtcgccatgcgtcatgatcctgccagcgcggccgtcgtcatcatgctccgtagcctgaagatgtatggcatggcgcaagccgtcatagacttgatcgagcaaggtgctccagcttttgatgcagccgtgccgatcctgtcccagttgttgaaagccgagatggccgagcgcgaggtccgctccatcgcctatcatatgaaggctgcacgcttccctgcctacaaggacatctctggatacgactttgccgccagcgagatcaacgaagcgacggtgcgccagttgcacagatgcgagttcattgacggagcgcagaatatcgtgctcgtcggcggaccgggcacaggcaaaacccacgtagcgacggcccttggcatccaggctatcgaacatcaccgtcgaaaggtccgcttcttctcaaccatcgaattggtcaacgcacttgagcaggagaaggccaaaggcaaggcaggccagatcgctgagaccttggtccgccttgatctgctgatccttgatgagctcggataccttccattcagcgcttcaggcggagcgctgctcttccacctgttgagcaagctctatgagcggaccagtgtggtgataaccaccaacctcagctttagcgaatgggcaaccgtcttcggcgacgccaagatgacgacggcattgctcgatcgtttgacccatcgctgccatatcctggaaacaggtaatgacagcttccgcttcaaggccagttcggcagccgcagcaaacaagagaggagaaaaagccaatcacttgaccaaaacccaatcataaaaccatagtcagaggtggctcacttctcggtggaaaaaccggctcagttccgcatggaaaccaacactccggggagctgactcttatcacgatagcaatattcgcattaagtcgtcgcggagaccttcagaacatcttcattgacgagccggagaacagtctgcaccctctttggcaggtcaagtttttcgaattcataacatcgcttctacgtcgtgagggtataaagttctttttcgcgacgcattcggcagtattggcaaatggagcgttgagtagcgagattccggtccacatcatccgatgccgtggagacgattatgaggaaattgtattcagccggcgggataccgatgaaagcgttgagcagttgctctgggaagcgttcgacacggtcacgccagccagcagctacctttcagaaacgatctcaaatctagtatgggatgtggaggaaaaccgggtgccggctcaggcggctcttatattgattgaccaatacatagaaaagtcgttcagcgatcatcagaaagaattcttggcagcatgtaaaaaactcatcggaaagatcgaggaatagtatgtattttcgagtgagcgctgaagacagaaaggcaatccgatgggcactatctaaaggcaaaccttgggatgttgacggcaaaaaaagtccattccgaaacgatccacgggcgaagcgtatcaaaattctgaagtctcacctaaaatcatttcatctttcgaaacagaaatttcgatgctgctattgtagaactttattgaaaggtaggtcgatagagactgatagagagcatattgcttcaaaagatatatttaaatcactttcttttcatcctttcaatttgtctgtcgcttgcaagacctgcaacatgacaaacaaaggaacgagaacaactcatcttcgtcgttatcgcaagaacggcgctctaatctcgactaacctcaaagatccaagcaactacaatatcgtacatcccaacattcatatgtggactgaccatatcaaattgcgatccgaggacgatggtatctcggcagtgcgtatttataagcccatcaccgctaggggtagatttacttacgaatttttcaaattgagggcccttgagatctatgaaaattcccaagagcaaaagagcccatctaccaaaaaggtttcccgtaacatccatccagacgtagtcgatctcgagacagaatatcggcagaggaagcgatcaaagtaagccagttgccatgggcgttctccgagctgcctcacgtatgcagcctgtccgcagcgtcttgaaggtcgtcgcgggcacaaggccgaaatcacggaggactggaaggtccgaaagtgcgccaactgcggaacgcgccgaaaaacgctgccgctcagcataggctgcgactacgtggaaggtgccttccaacgtcatttcgagcgtaagcggtgtctcgccggcaccttgatcaaatttcgcttttctaatgtcgatgatttgaccctcggccggacgacaacgatccaccaactgctgtcacgagcagtacaagcgcgactgctgaccgggagccttgccattgaccaggccttggggaccgcgttcgttgaagcgtatgacccagtccctgatgatctggagcgtcacattgccgagacgggctgcatttgagcgtgagccaccgtcgtagatatcctcccgacgcagctcttggtctccgaaataatctggattacctcgccgctcctcggaactttgaggtggtgcgcggaatgctcgcggattatcgagcagggcttgagttcgattatgaggacgacaggcgtgacaaggaggcgggccgacgactgcaatgtcctttgtgactatggcgctcatgcttgatagccagtgacgccttctggcgcaacgatgccaaggcagcagttggcccaaagcggtcattgcacgtgccgcaaaatgccgaccatccttaccgaagttgtccgtttggaaaatcagctcgcgaagtagcgtgtcggcgttgtgcccaatgccttcttgaacatgacgataaaggcggtcgcggattcatatcccaagtcgctcgacaccctctggaccgtcgcgccgctggccagttcacgcaacgcgatgaccaggtgcagttgccgccgccatcggccgaaggtcagtccagtttcctggaccatcagccgcttcagggaccgctcactcatggcaacatgtgccgcccaatccacaagcgtgcgacggtcactcggctccgccatcagggccgcagtgatcgcggcgattttgggatggctggacgcgggtaagtccagcccctgtattggcatttgcgcgagctcatccagcaagacccgtaccattctgtcaatatgatcggtcggagcagaactgaccggtacatccgcaagtcgcaggatcatctcgcggagcatcggcgacacagacagcgtacagcacgcctgaggcagcttgaccgcttcgggttgaacgaacagataggacaggcgtgcgttggacgtaacctggttgctgtgcggcacgccgccgggtatccagaccccgcagtctggcgggacaatccagatgccattctccgttcggcatgtgacggccccgtgcagcgccaaaatgagctgcccttccttgtgctggtgctggggcacttcagcctcatagtcactgaagtcgagacggacagcgaaggccggacgattcgaccgatcgggttcaatgtcgtcggagcagggacgccgttttgcggattggcccgattttgagatcatctggcattatctccaaattcgtacgcacggcgatagtctattcctgggtgattaacaaccgaatggagactgtcatgcgaatttctgtcgtcggcgccacgggacgaattggcgccaagctgacccggaccctgttgagcgccgggcatcaggtcagagcgctgtcgagaggtggcccagccttggacgcactggtcgcgctcggagccgagccgtttatcggaagcttcgacacaggcgcgggagaccttgaccaatttttccagggtgcagatgccgcgttcctgatggtgaagaccgattggaacaacatcgagggacactaccccgctgttgcccagcgctttgtcgatgcgctcgaaaaatcctccgtcaaactggccgttagcctgacggccatgggttcggacgtcaaagggaagaccggccattttgaaagcttccaccagttggacgaaaagctcaaccaactcgacactgttcatctggtccacctgcgcgccgcctggttcatggagaatgttttggcgtggacggggccggttgcccaatacggtcgaattgcctggttctgcaaacctgatttgaagatgccctgggtggcgaccgatgacatcgcatggctggcggcgaaggaactgaccaatccgacgggcatacgccgtgtctatcgcgacgtcggctcggaagatatctcgatgaacgaattggtcgcgatgattggcaaggagatcggcaggccggtggagtaccgacacatcgagacgacccgcaaagacgtggaagctgaatttctggcgcggtttgggacgccggagaaatggcaggacgacacactgagtgctgacgctctcaataatggcatcgtcaggttccatggggagcacgcggatcgtccgaaattgcccacgaccatggaggtcttcataggtgatgtttggaagccgcgctacctggaggcggtcagagcgggagaccaacgagagacgtttgccctgtggaccgcgcgggactagcgggaggtcatgctggctctcttgaattgtgccggcagttttcagcccttactgggagctaccgcaaattttgtcttgcggtagctatgactgctattggcgcaacgcatgcaagggcggcagtcggcccaacgcggtcattcagcaccgccactttggcaaaccttagggccagccgtcacgccgctatgtgtaaatcccatatctgcatcagtgccgtgacggcttcgttaagatcgcctccatcagcaccgtcccgcgcttcatatgcaattcccatcaggaaagtatgaaacaggttcgatagcccttgaacattcgtagtgctgacaagctctcccgaatcgaccgcacgcctaatgcaggtttcgatgcccccacgatttcgcatccgatccgctgcgagcacattatctacgtgacgattgtcgggcgcgcagttgctggccccgaggatcatcaagcatcctggcgggtgcgttttgtcggtttgcatctttgctgaaagcctaagagccgtctcgatagcttcgcgcggtggcagagtctcatccttcaggcttgcggttacgcgcccgtaggaggactgatagcgcaggacgacctcttcgaagagggcttccttagacccgaaggccgcataaaaacttgccggagaaatgtctcccatcgcggctttcagttgattgagagaggtcggctcatagccctgctcccagaacaggatcatcgcggcatccagtgccttctccctgtcaaacgctcttggacgtcccgttcgagccatatcgtgcctccttaaactaaatctgtactattcgatccagaaaagcttgccaagcgtatttagtgcatatatgtggatcgttcgatccatatatcaaggtgcacgaactcaatgaaaacttgcgaacctgtaaacgataccgaacgattgcccgttgctggcttactcgcactagcgatgactggctttatctgcattctcacagagacgcttcccgcggggctgctgcctcagatcactgagggtttgggcgtttctccatccctcgctggccagatggtgactgtctacgccctcggttcgctgctagcggcgattcctttgacgattgccacaaccagttggcggcgcaggacagtcctactgtccaccatcattgggtttctgatcttcaactctgttacagcgatttcgtccaactacacgctcaccttggtcgcacgtttttttgctggcgttgccgctggtttggcctggagccttttggcaggctatgcacgacgcatggtcccttcacaccaacaagggaaggcgatggcgatcgctatggtcggaacgccgatcgcgctgtcgctcggcgttccgatggggacatggcttggtgcgcaggtcggctggcgaaccgccttttggattatgtcgatattgacgctgatcctgatcggctgggtcgtaatgaaagtgccggactacccaggaaagaagaagggcgatcgattgcccctgcttcgggtattttcaacccccggcgttcgaccggtcctttccgttgtcgttgcatggatgctcgctcacaacattctctacacctacatcgcacccttcgttcagtcggccgggatgcaggatcgggtcgaccttgttctcctggtatttggcttggctgcgctcgtcggcatctggatggcgggaaagctggtcgaccgtcttctgcgagcaaccgtgctgaccagtctagccgccttcggcttggtatctctgcttttcgggatcgtttcgatgtcaccttgggtcatatatggtggcgttgccatttggggcctgacattcggcggggccgcaacgctcttgcaaaccgccttggcagacaccgcgggtgatggtgcggacgttgcactgtcgatgaacgtcgtcgcctggaatggtgccatcgcaggtggcggtatcatgggcggtgttcttttggatgcgtatggacccacggcgtttccctgggcactgaccgttctgctcgtcatcgcccttctgatcacttggtccgggcgggtgcgcggatttacaccaggggcacgtacctccaacgcaaaggtggggggacactgacgcctcacgaagacaagcatcggtcctattgttaccgcgatggggccgaaacatgaccatgaccgatatgtggagccatgtctcctattggcgcgaagctgccgagatcgccgacccaagttgaccactccgaagagcaagtagttgcctatattagaaaaattaagacggacagaaccaattaactaaggttcagaggttcgcatccgttcaaaagctacacctgcgcgcgcaacagtccgtagattcccaggaccattcaatccttcaaaaggttcatttttgccaagggtccggagaattgctgcatcagcgcgcctgtcgtaagggtgccgaggtcgattgggaagaaaccgagttgatagatcaactccccaatcgtccgatttgcatccccatagtcaccgctcagaaagagaacccgtcgacctattccagcatctggatcagcggtcagtacgtgcgcctgaagcgtgttaaatgctttgacaacgcgagcaccgggagccatttctgcaactacttgagttgagagcctatctccaagatctcgaggtgtaaactctgggaaattgatggcgtttgtcgcgtccacgacgatccggccctcccagtctgcgaccccgccaactgccttctgtaccgcatcgaaatgcatcgcaagaatgacgatatcggcgagaagagcatcttcaactttcaccgcttctatcaggcctccaaactttgccgtcaattcagcaagcgattccgggccacggctgttggtgatcatcgcgttgaggcctgcggcgaagaagcgtgttgccagtgcagaacagattttaccggacccaattattgcgaccgtgctcatgccaatgtctctcgtccggaggggaaatcgtaatcgtaatcgggtcctacggggacgatgcggctagggtttagccaagggtggctaccgtagtaatgtcccttgatgtgatcgaaatctacggtgtctcggaacgcagagtggttgaacagatcacgcgtgtaggccgagagcgcaggataatcggccagagctcggaggttgcatttgaaatgaccatgatagacggggtcaaagcggaccagcgtggtaaacagccggatatctgcttctgtcaattgtccgcctacaagatggcgttgccgggaaagacgctgctcaagccagtcaagcgtgccgaatacttcaccgacggccacttcatatgccacttgggcggttgcgaatcctgatcggtagacgccgttgttaagtgttgcgtaaatgcgctcgttgacggcgtcgatttcttcgcggtggtcatctggatagtaattgcccgaggtcgcgccacagccatcaaacacggaattgaacattcgcaggatatcggcggattcgttagagacgatccggccatgtttcttgtcccataaaacgggcactgtgacgcgggacgtgcaatcgggatccgagattaagtagatctcatgcaggaaattggcgttgttggccgcatcagcgacgactcccggccccggctcgaacgtccagccgtcatctcccatcaaccagtgaaccacggatacgtcgattaaatcggacagacctttgaggttgcgcattatcagtgtgcgatgcgcccatgggcacgcgagcgatacgtagaggtgataacggcccggctctggcttgaacaggctgtcgggctcgtcattaatccagttgcgaaacacggagggcggacggcgcagttgcccatcagccagtacgctctccataccgctgcgctgccacacacctgcgatcaattcacccatgatgcgtcgcctcgccaagaactgccttgacggcgggtgaaacctggctgccgagcaattcgatcgaacgctgcatggcctttgtctccagcatggcggaactcatctggaaggtaatgcgggaaatcccacccagcgctttgtcagcagcaacgatcttgtcgcgcacggtctgagggttgccgatcaggaaggccccatccggtccgcgcatcgcgtcgaattgggcacgcgtcgcagtcgaccaaccgcgctccctaccgatttcggtgaacatatgcgcccagcccggaaagaaggcgtcggctgcactctggtcggtatcaccgacgaagcccatagcatgaacaccgactttgagcgtctccggcgcatgacccgcgcggttgccagcttcacgatagaggtccacgagaggacggaaccgttcgaaactgccgccgataattgccaccatcaatggcagtccaagagctccagcacgcgcgaaagattgcggtgttccgccgacaccaagccatatcggcattttttgctgatgtggacgcgggtacacgccttgcccgttaagtgcaggccggaagcggccgcgccaggtcacattggttgtttcccgcaatttgaggagaagatcgagcttctcaataaaaagagcatcatagtcgttcatggcaaagccgtagagcgggtaggcctcgccgaatgaaccgcgcccgaccacgatttccgcccgacccttagagattaggtcaatcgtcgcaaaatcctgaaagacccggacaggatctgcagcgctgagaacggtgacggcactcgcaagtcgaatgcgcttggtgcgcgccgcagcggcagcaagaataatggctggtgcagaatccagaaactccttgcggtgatgttcgcctatcccgaaaacgtcaaggccgacgcgatccgctgtttccacctccgcaagcaaagcctccattctatccgctggcggcacggtgaggccggtggccgggtttggtattgttgccgcgaagctatcgatgccgatttccatgttcgttccaatatggtgtcagaaaagaaaggggctggctcgttgttgtcaagaacgagccagctctgaaatcatgcagtcctcagacggcgcgcgtcgaggctgagggaccccgctccgaacgccgccacttgtagaagtccgccgacgatggagatgtttttcaagaagtggatcatctggttctggtcggtaaaatcgttatggaagaccagcgccgttgcgagtgtgaaggctgcaatgacaaggctgacgatgcgggtctgatagcctatgaccagaaggatgccgccacccacctcaactgcgaccgccaacaggtaggacagcaaaggcaggggtaaaccgacggaggcgatgtagccctgcgtagcctccggtgccataatcttgccgagaccgctgaagatgaacatgacagcgaggagaagtcggccggtagccgccagataattgttattgggcattggttgtccttgaactatttgatttgttgtaggtgggaagtgtcacgcggcgagcgcgtcgatctgtgccgttgcaccagcgatggctgcggccttggcgtcttcgccgagagcaaggccctcggcgcggatgaccgttacgtcggtcaggccgatgaaggcgagcacgccgagcaggtatgtttcctgatggtcaagggctgcggcagggctgtcacctgtgtagactccaccacgggcggatgccacgaagacctttttgccttttaccagaccctctggtccgttggcaccgtactgaaatgtccgtccggcaacgcaaacacggtcaatccagcccttcaactgtgtagggatcgtgaagttgtacatcggggcgccgatgacgataatgtcggcggcgaacagatcgtcaatgtaggcaccacctgtcgccagatcctgaccaagggcagcgctgccgacttcaccgccctgaaacacggccatatgctcgtccgagagatgcatcgccgcgtcgatgacgagatcgcggcgaatgatactggcaccgggatggagcgcctcttgcttcgcaacgatttcggcggtgagcttacggctcacggaatagccgcccagaatgctggaatcgatatgcagaattgttgtcatggttttcgtctccccggatttgcccgaaaaagtagagttgttacggataaggaagtttctgaatgtcttgatcatgactcacatcatcatgatccgacctgctggagaagcctgtatttcccgatgacatccatcggctgaaacgatggacaaagcacgattttcagcttccttggcgcattgacgctaaagatgcggcttcgtgtaggggaaggaggacggaaaactgacaacgagataagcagtgccattaggaaatcttgtattgtccaccgtcaacagggagggcttgtccggtgataaacgaggcatcttcgcttgtgagaaagcagatggcacctgcaatatccgagggctcggcaaagcgtttaattgcctgtgtctcccaggtccttcgcttttcttcttctggcatgtcctgtgtcagccttgtgttggtgatggaaggcagaaccgcattcacagtgatgccagaggcagcaacgtcgttcgccagcccccgtacaaagccgatcactcccattttggaggccatgtaatggctcattccgggtatcgccaagccgatcgaattggacgagatgttgacgaagcgtccccaacccttcgcgcgcatctgtggtacgaactgctttgcactcaggaagtgggcgtccagattgatggaaaatgtctttcgccaaagctcgatgtcgagctcgtcgattggtttcggacttcccataccggcattgttcacgacaatatccgtaccgccgaagcgttcctggaccttcctgtcgatacgctcccaatcggctgcgcttgacacatcgcccgtcacgatcaggtttgcgccttcgatcatgccggcagtttcctgcgactcttccatgtcccaaaggacgagtttggctccatgtccggccaacttcaaagctatcgcctgacctatgccacgggcagcccccgtgacgagggccacacggccttcatggctcggtttcaatacggtcatcctgttagtcctctacgaatttgcttcgctacagatacgtgccagttggcatcgcgccggtccggcgcgttgggggtctgcgatcagaagccggagtcgcccaacgccttcatgaatgcctgtgggttccagtactcgcggtagctcacgataagcccatcgcgaaaagtgacgaaggtggcgtagctcatgtcgtagggattggcgttactcacgacgattcccgaggcgctccattcggcgatggcgacattcgggtcgtctgtcacatatatccgcaacgtcgggagcgaccgaatatcgatgacattcggatagttgcgcagatattcgtagagagcagggcgaccttcgatccttgtcggcgagcccggcggggcgaatggaaactccgcgactacgtcctcggcgcaaagtgcggcccagccttgcatgtcgtttgccagaaatctctccaggctttggcgcagcaggtcggcggcagttgttgtggtggtcatgacgcgttccaatccgtatgtgataatctttgcgataacggcagcgacctcccgcttggcgtggtgtcgtcgctgtgaaactcgctgacgcatggccgcaccagcatgccagctcagtcaagaaacagtaatgtgtcagtgccacagttgcataaatgggactagcctgtattgtccgatggaacccataggcttgaccgataggaaccgacaacatgctagacggagtctcactcgatcaattgcgaacgtttgtagctgcggccgacgaaggcagcttttctgcggccgctcgtcgtctgaaacggacccagtcggccgtcagcgaaagcattgccaatctcgaagcccaactcgccaccactctgtttgatcgctcggcgcgatatcccaagctgacgccgcagggagccgtgctccttgctgacgcgcgggctgtggtcagtgccgtagacggaatgaaagcacgggcgagaggtattgccggaggccttgaacccgagcttgcagcggtgatcgacgttttctttccgattgcgacgattgccgatgtttcgcatgagttccgccgggaatttcctgtcacaccgttgcggctctatgtagaagcattgggggcggcagtgcagccagtcatggacggccgagcgagctttggtcttgtcgggtctttaccgacactgcccgatggtcttagggcggagcgcatcacgagcgtcgaatttgtcatggtcgcagcggccatgcacccgcttgcggaacgtgaggggcttataccccgtgaggaacttgcccgtcacgtccagttggtgctgaccgatcggtctgatctttcaaccgggcgggaatttggtgtcatgtctcccttgacatggcgcctggcagacctgtttgccaaacacgcttttctcgtgagcggacttggatggggtgggatgccattgcacaccgtcgaaaaagacattgctgacggtcgcctggtcgaactcaccattgaagatataccacccggcggtttacggttgccgatgtcagcggtttatcgggtggacgctccgccaggacccgcagcacgttggatgattgatcgcctcaagcagtgctcaggataaattcgcagcgaagccagttgacagagcataatgtgtgtaatagtgctgattacacattaacggagattgtcatgcctaccagcacccgtttcgccgtcgccgtgcacattctggccgctcttgctgtcagtgatggaaagccgatgcggtctgaggatttagcctattcggcaaatacgagtgcagtggttgtccgcggacttttgtccaggctgatcgatgcaggcttgacgcggtcacaactcggagctggaggcggcgcccttctagcaaggccggcagaaaaaatcaggcttctggatgtttacgaagccgtggaagacaccgagttgttttccttgcatcgcacgccgccctgtgagaactgcgctgttggtggaaatattctcgaggcgatgcagcctgtcctgacgagggctcgcgcggcgcttgaaacagagttggcgaagtccaccgttgcggacatcgcagcggaagtggcgcgccttggtaaattctctatcccgctggtctggtgatcatttgtcaataaatgtaactatgacggcgacatacattcaatctgattgttatccgtcaagttgaatcccaggaattgctggccgtaggggcgttggcagttctcgtcttttaagccccgtttcgtttgcaggagtaaaactatgactatcggcattatcggttccggcgccctcggctccaaccttgcacgcattttcgccaagaatggcattgcggccactatctcaaacagccgcggtccagcatctcttgcggcactggtcgaagagcttggttcgtccatcaccgcaggtacggtcgaacaggcggcaagcgccgacatcgtctttgctgcgatgcgatggagtgttgccaaagacgttctgacgagtttgcctgcctggaatggccgcatcattgtagacggaacgaacgcggtggaattcctcgagcccaactcgcccgatgcgaatgatccaaacaatccattggcggcctatggcatcaaggcggttgatctcggcgaacagcattcgagcgaagtattcagccaatacgttccaggcgcacgggttgtgaaggcgtttaaccatctcgacgtcaatgtcctgcctgagcctgaggtgtcgggtggaaagcgtgtgctgttttattctggtgacgatgctgatgccaagtccgaggttcgcgcgatcatagaagcgacagggttctttgctgcagatcttggtactctggatgctggtggtcggcttgcttcactgcccttcggttcgttggcctcacacagtttcatcaagatctgacaccgtaaagactggagcatgaggaagacgcaccggcgacttcctcttcttcgaacgaagcatcatttactgtttgattgtgctgatcagcatcgcaacgaaagctgaaacctttggtggacggaagcgcgccgcagggtaaaccgcatatactccaccggaggggaggctccaatccggcagcacatggatcaggtgtccgtttgctatcccggcttcggcaagaaaatccggtagcacagacagtcctgcgccgtgcttgacggcctccatgaccgctggcgtcgtgtttatggctatttcagacttgaaacgtaaggtctgggtgttgcattcgccctgggcgaatatccattccagaggctctcgcaacgaagcgttggcaacgaaggaaagggaccctaggtcttccggatcacgtgctttcgacagttcttcggcaagcgtgggggagccaaccaaatattgtcgaaaagaaccaatccgtctcgcctgcatgctggagtccgtcagccatcccacgcgcacggcgaggtctatgttgtcggccacgagatcgaccgtcttgtcagtgagattgagctccaccttgcaatcaggatacctggacgtgaaggcagtgatgaccggaaccagaacagaagtgccgtagtcgtaaggcgccgttatcctgagcatgccgcgtgggtcgaccgcggcctgggccagttcgcccaaggcatcttcggcatctcgcaggaccgatacgcaacgcgcatgaaacatccgccccgcttccgtcggctggagccgtcgcgtcgtgcgcattagcagtgttgttccaacctccaactccagttttgcaacctgctggctgacaaccgcttttgtgattcccagatactcggccgcacgcgtgaatgaccccgtatcaacgacagcgacgaagtaagagagccgattgagattggtggccgcaggcatgatcgtccctcaaatgattgtcagcttttaacatacagtttgtagtctccgtgagtcttttcaagtcaatatcggcatgtcatttatcgcttcacagggcttggaatgttagcggcaaaccaggttcgaggcggaacgcctaacgatggcgtccagcgattgcgtacgtttcaagtcttgccaatcagagccatagaatttggacggcgttggtgtggcaccggaactttgggtcaatctcggctgaaatgatcagccgtcgcagatcgatacccgtctctatgcggaccatagattactgaaatggacactttgatccatacacaggagatacagatgtttaccaggagaaccgttatgaagacgacattggccgcaggtgctgcagccattttcacacctgcggggctcgcccattctgctggagctctaacatggaagcatttccctgcaggagagaacggctttttccgtgctcccgttgtcatctccggcgcgaaggaagcgattctgattgacggcgggtttacactttcagatggcaaagcggttgccgatgccatcaaagaaactggcaagacgctcacgaccatctatgtgagccagtccgatcccgattactattttagcctgggaccgatcaaggccgtctttccagatgcaaaggtaattgctgcgcctgccacggttgaggcgatcaagggtagcgtcgagaaaaagcttgctgtgtggggtccacagttgaaggaaaatggtccgcagacgcttgctgatatcgtcataccggaagccattacggacaccacgttgagtgtcgatggtgaggcgatcgaaatcgtcgaagccgaaggacttgccaaccggcgctatctcttcgttccgtcgctgaatgctgttttcggtggcgtgctgatattcaacggtgtccatgtctggaccgccgacacgaacagtgccgaattgcgtgccgcatgggtcgccaatctcgaaaagatagcagcgcgcaatccgaaaattgtcgttgctggccatatgacttccgatgcggccacagacctctcgggaatcactcataccatcgcctacctcaaagctttcgatgaggagttgggtaaggccaagggctccgccgtactcaaggccgcgatggagtcgcgctttcccggtctcggcatgggcgtcgctcttgatatcggctccaaggttgctaccggcgaaatgaagtggggctgatcggctgggttttgatgaaagtgcagtcgatggcgcaaacgtagcctgtttgctgaacgtcgttgcccggaatggttcgccaggcggcggaatcgcggggcgctttcttctggattcatattgcctcgcgtcatttcccactaaccgttctgctggtcatcgcccttctgatcacgtggtccgggcagagacggatttacggcctgtgcgcgtacctccacgccaaaagtgaggggacactgaatcctaacgaaggcatcggcctcaccgcttccggcgatggggccgaaacacctccgtgattgagatgtggctatgtctcatgttggcgcacagcggccaggttcaccttttggccctaatccgacattggggaccgatagctgccaggcggctacgcgccttcatgtcagccgtagagggacacttagcctgtgcccatgagcagactttagttcaacttgattgatcctcatctcagatcgccgcaaggttgaagtttttcgcgaagacgcttcagctcaggaagtccgcttgttctccagatatgcacgccatctgcgggtcagtttgccgcgacggagttgatatatacccggtaacgcgactggtgcaccttcgacgatcgcgttgtaatccaccaggagtagcagaaggtcctgctctggatatccacgtgcggccgcactttccacgcgttggaggatattatcaattgcgtcggcagcggccttgtgtgagatcatcgcgccgaccgtgtcagacgagaccaaaaacactagagccgctactagtacccgcgcgagtgagacctgtgtgtccgtagacattgaagacatagcgtgccatagcgtgaagcccatcaaaagcgcaaccccaaccatcacgagtcgcatcgcttgtgcactcgcgcgctgtaagtcacgcgtccaataggctgattcttcaattagctcggctaagcggcagtaactcggttcggcgcggctcgcgaagtagttctcctcgcgcgccatcggcctgttttcgatgggcgcagtgaagtggtcaaagattctaagccgttgctccgccgagaatcgtgcatttagaccgctcgtcaagagcaccgcccgtcgcgcctggtcgccagccgaacggtgcttccgttgcttgctgcccatccagagccaaagagcgccaagcccaaagccgatgagcgcgaagttcagaagagtagcgttatcactggagtagactgagatcgcggcgacggcagcgattccaaattgggaggcaagtgccaggttctggtatgtttgtgcatggtccaactccgcacgctggtgggtcaacaggcggtcaataccaaacgaccccgctgcgcgacgcagaacctcggcgacaaagctcgacttgccttcagtgtaggcgttgacgtcaataggaaacgccttcgctaggcgttccttgagggtgacatagcggcttgcaagggcgggatcgccggacaattcgtcacgaaatacaatcatgtcccgtccccaagggcttccgttgggaactaagtgaaggtggaagggcgtaaccggatccgccttcacgagaaaaacacgcggcgggtggtcgcaactctcctccttgatataacccgctgctttcagcgtttccgccactcggggcgcttctgaccagtctagaagcgagaccaacaggtcgatgaccggcttgcctctgagaccatggatagccgtagatccgacatgatcaacaaatgcgcgcgcaggtgtaatggcaacgcgtatcgcctccgcctcgtcggcgcaacgctgtgcccattgttcatcgtgcgcaacaatgcgtaaggtatcatgcgccgtcattctctctccacatacccaaacgcaccaggatattttaccaggcaatcatattattaattgccgctgtaccacgcgttcgacttaatgatctctcctatgaatccagcaattcgtatatgcctgaacatagtttttcaacaatatcggcgcacaggcgacatgaaggcatgaccgcgatcagaatagatgacatctacgtccaaaaatggcggcgcgaagcggaaatcttttccgctgtcggcccaaatctgtcagcgtttgcgagaggactgacagcttcgcgcctttaaatcggtcgttcaggccggctcccggatcccctaaacgcagacagtttgctcgagtcgaatgggtggcgataaatggggtattgtgttgcggcgcaagtagagttgtggatatctcgggtcaaatccgcgtttcgattgtgagattacgacgcgatcacgtattaatatcgacatggatcttagcgagcagctcagcgcgaaaattacgattgaactccatcgattggaggaagactgttcacactccggtaaagctcatttcaacgccagcggccgctggaaccagttcaattactggtttggaataccttcggtcgtgatcagtgcgattatcggtaccgcgttagtcaaggaccacgtcgtatgggccagcgtcggctcggcggctgtcaccgtccttacagctcttgtcaccttcctgaagcccgcggagaaagcgaccctccataagaacagcggcgaccagtacctcgctctcaagaacgactcccgcgtattccgcgagatcacgctgttgaagaatgccgaggaggccgctgcaattgaaggcctggaaggcctgaccaagcggcgcaacgaactcaaccaggcaagccctttgttcgctaaccgtgatttccggaaagcgaagaaaggcgtggacgaggggcaggctacccacgtcgtggacaaggctgtcaaatgagcgtgaattcgtacctatcgaaccgagcttcctccgccgttctttccgaggacgaacggaagtcgatcaacacctcgacaacgacgctaggcacccgcctggacagttggttcaaggtggacggcgacaagctgcagtctcatttccgattcgggtcgcagacacgcggaaccattctgccccggcgcgacgatcagcattccgacgtcgactacatggtcgtcttcgagaagggagggcgaaagccgcagagctatttggatcgcctcaagaaattcgtggagggcaaatacagcacctcagaagtataccagtcaagcccgacgattgttctggaattgaaccatattaagttcgagcttgtcccagcgctgcaatactacggaagcacttataatattccgaaggggccaaacgactggcagaccacgagccccaacgactttaatgcgacactggaagagaaaaacaagaacaaccagtacatgatcaagcccacagttcgtcttgcaaagatatggaacgctgccaatggttatgtcttcaattcctatctcttcgagaagtggatctgtgaacggagctactggctggcgaataaccagtgcgactaccttttcacagtgttcgacaacctgcagcccacagacgccgcagcgtggcgaaatgagaagataacgagagccaagaaacttgtcgccgatatccgggaaaacgagaagcagggatatccaaacctagcagaggccgacgcaaagaagctaatacctgagtaattcctgcacctcaacacgagcttgacggaggttgagcttctgcggggatgaactcatcgacattctttggcatggtctccgaaacccgctggcttcgatcggcagcggcatgcgcatactttccagagaggtcatcaatcctcgacgccagacgttgctgtgagttccgataaaccgccatagagcgcccccttggcggacagttgcgtccatcggatgactagccaatcagccacaagacagtttgtaaagagtctgagctactgtgtgtaacctttgtgtgtcagcgttcaatctgaggagccggctagccgacactccgcttccggccccgtgacagccgtcgacttcgaagcggttatgtctcctattggcgcaaaggggaagacagtaattgggtcgaggcggtcattcatgggcagaccattcccttcaacctggatttcatgacatgatctgaagtttggggttcttgtgggtggaataatttcccactgtcaatgtcggctgttccagttcgggcgctatcatcaaggttgcgaagatcactcggtgttcgcaggtcgccgcccgcgatttttgaagcagcattcgttgaaagttgtggcaccgctctacctgcatccctttgtcctcgatcgagtcgagaatgcagaggcgaaggtgcttaaaaaaggagtcctgcgttgctgctgagaacagggcaagaaagaagctgttccgaaggatgacgcgggagctcgccgaaaaatagctttgattgtccacgccgagcttgttggaagcaaagtcgaattggtcggacttcgcaacgatgaacgcttgctcgcgcgagaggtctccatggagaatatcgagaacctgccgctctacgctggcgtaggcgacgtccaaccggttggcgagcgccgttcgtagaagatcgttgcgggtcgagagagtgttgattcttccactgatttccgccttgcgcgcgacaagcttctcgaacggggccgaaagcttttttgctttcgagatcctccatctgtcggtcgatgtagccgaccgaccgctggagggtcctccgacggcgctgtgggaacgatggcgtggtcggggacgatgtgcagaatccctgcctctaattgttgacaatttgccagattgctacatgcattgcgtcatggattcgactgtcgacatcatgatcgctctgagggcgggccgcgcgctgttgggccttagccaagaggaactcgcggggctcgctggggtcagccggcagatcgtcgtacgcatcgaaaagtgtgagagcaacgtgcttgcggaatcgatcgacaaagttcgcgccgcgttggaaaagggtggcgttgccttcatagaggcgtcccgcgaacgcggtccgggcgtcgcaatctctcgcgtatagtatcgtgttctagctgttacgacgtaaatgaatgaagtccgttaaacctgacttcgatttcgttggacagatgtcgatcccgactggccgggaccatcgcacagtgacggtgcgatggtccctgtgagccggcatcacgcttggacgcttactcctctgggccctgcaccccgttacggatggccgttagttcgtctgcgagccgctcgacagcttctctaacgtttgccccgacagtcgatagagactgaaatctctcaatacgagccgttcgacccataacgatatccgcaatgacatccgagaagccaaggtttatcagcagtgcccagactgtccttctgagatcatgccacgtccatccgcggaactctaggccgacctcgtggagaaccggtttcatgcggtcatctatcatcctcttcatcctggaccggttcctcggtcccttgtcgccagcgcccttgccgaacacaaagtcgtcgcccgcgggctgtgtgatggaccgcaactcctctagaagcgccgtcgccgcactggataggagatggacatgcttgatcccgtctgtagaccgcacggcccatcgtccgtgttcaaggtcgacgtcgggccactttgccctcgttagttcgttcagccgaacgggaaaaaacaccaaagatttccctagtatctcgtccgacaccttaggcagccgctcgcaggcgagaagataggcccgtagttccgctcgcgacaaaagcatcgggcggcgatggcgaacattcacatctaggactctgggtgtgagatggagcacggggttcgcttccagcccgaagacgcgtcttctgtccggtgccatcgcccacgagagcattgccctcaccttggcgaggcagttgcgtccgagcacaggttttccgtgctttacgaagcctttgacgaagtcagcgacatcttcgtcggtcacttcactcatcagcttgttcgtccaagaattgaactctggattcatgacgtaccggcggaaaaacttgatctcatccggaacgctgaggttacgggccctatttggaaggtatgcgaggtatgcttcgcagacgtctttgaaccgggtggcgttagagacaatcggtttactttcttcttctttggtattggaggccgccaagaaacttccgggcgcgattaatggaattctcggcgcgaataggttccgtatattaaaagtcggcataacgatttcctttctggttctgccgtcgaccgcgcgacgcggttgatcggcgtattgagtttttggatgtgaatgccgtgaattacgggttgggatcggctatctggtctgacgcggcctttcttctggcgagtcccgcgctcgcgccaggcttgaggccgcacgctcgagctcgctgacgatgcgctctatttctgagggccgggtgttcttggcgagccgccactcgcctcgccagcgatcggatggcctaggagagtaggcgatgagcctcagcacgcctgccgggcgcatctgccactccacccaagtgatccccgccaccggatccgaacgcctgtcgtcgagatattcggccggttcgtaccgaccgtggcctagatagcgcatccgtcgttcagcgtgggtttcaacgatcgccagacccagcggctcagcattgattttggcgattgtcagcatgcgcggcgttcggacattgaagtctctggcacggtagtggagaggcgcccgttcccagaggtcgatgacgggcctgatggcgtcttgtccttcatgtacttccactgcgtaccctcgacgggcgagctcaaggaacagcgtgttggcgaaccgaagggcgcgcccgaacgtgtcggcactcgccgtcaggtcgatcgccgtgcgcagcttgggatcgcgacaggttcctccaggaaccggaggcccgaacgacccgatccttccggagaaagccaggagaggatggacgccgtcggcgacggaaggcatccaaaccttccatcgattgaacgacccgatagacttcgatgaagccgtcgccctgccgggggtccaatcgacgggacggccgggctttggcggcggtagcgggggttggacggtgaccgcgcccgactgtctttttgcccaccagccgcgtggaggcttcggcacatttagagcccggcagatccggatgacgtatgcgtcggaaaccccgagcctagccgcagcgtgccgtgtgggaactgaccacatgagctgatatagttgttcgcgagtaatcatgcgccttcctccgtcaatgttcccactcttcgattgacagcgtcccagcgtcgatcttgcgcaggatttcagaccaggtgttgaacgccttcctgatctcgcgcttgtaggagtaatggttgtagacgcggtccatgccgcccttggaatgtccgatcgccgcctccgcgacctcccgccgcccgacgattggctccagatgcgtgcggacggttcgacggacgtcgtgccaacgccaagctcgcggcggtgatccgtccgacttcgccggcaggcgctcgttgaagtccttcaaaaaggccgccctcattttgctggagttactgagagggaaccgtccgtttgacgtgctaaagacaaagtctccatggtcacggggtagctcggagcgtagtcggagaaacatctcgaccaccacgtcggaaagagggacgacatggtcctcttccgccttcgacgttccggcggcgatcaaccaagtcttcatttcgagatcaagatgcgaccagcgcgtcttcagtacggcgcctattcgttgtccggtgtgcacaagcacgaaaaggctatcgcgaaacggcttgggcgtcgcagccatcgctgcgaggtatgctcggatctccacatagtccagaactctcgtccgtaatttgcgtctgaggttcatgacacgcggcgtcaagtctgtgatggggttgtatctaagtccgatcgttctgcgcctctgcggctgcatcgcccaaccgaaaaacgtcctggccatctttaggaccttgaaggcagtgggtctgaggcccttggtgatgatcgcttcgacgagcgtcgcaacgtcttcatccgtcacctctgagatcggcttgtatacccaagggttcctgtcgggatccaggaggtagttcctcaggacggcgatgtcgcccagcgtggcgcggttccgttcccgcgttggcaggaacgcgatgtagtcctccatgacgagggcgaaggtcgatcgaaggcggatggcctcctggatagcttcctctgccttcttcgtggccgggtcgaccccatcttccttgaggccgttccactccctagcgatgcgccgggcttcttctgtacttgtctgtggaaaggcaccgatcgcgcgcctgacggtctggccgtccgggctgaagcgggagataaagtagaaggtcttgtttcttgggccaatcctgacggcgaggttgctgaccttttcgtcatagatttcgtagcggtcgtcggtggtgatggctggtgcgaggtcttctattaggtcgtcgttcagctttgtccgtggcatatgtagcttccttttctaactaggttgcgggcatcaatccgggcagaccggccggcggggcggcggaatgccccagcacgcaaagggaagcgagatcagggataaaagtaaagtgttacaatgggttagtgtacgtgatgcgtcgcgctgcgacacggagtcgcgagctttaacgcggggtggtagaggggatttagacgggtcaaatttctcataacctgaaggccgcaggttcaaatcctgcccccgcaaccaatcattccaaagactgaaatcacataagacaagacaaacaaagcccgcaaaacgcgggattttggcgttcgcgaaaggccgcggggttcaaattccgcactcgcaaccaaatccccatgcagacacagcgacaacgcacaatggtccgcgacggctgcgattttgtgtgtaaggtcggcacatgacccaatcctttctgatcacaggtcccgacgatgcgcgcgttaccctgcttatggcgcatggcgccgggggcgcgatggattcggcggcgatgacgcgggcggccgatgcgatcggcggggcggggctgcgcgtggttcgcttcgagttcggctatatggccgagcggcgatcgtcggggcgcaggccgccggcgccgaaggccgagcgattgatatccgagtatctcgccgccgtcgacgcgcttggcgcgccgccccggctgatcatcgggggcaagtcgatgggcggccgggttgccagcatggtggcggacgatctcttccgggccgggcggatagtcgggctgttctgcctcggctatcccttccatccgatcggcaagccggagcaactgcgcacggcgcatctacgacacttgtcgacgccgacgctgatctgccaggggacgcgcgatccgttcgggacacgcgacgaggtcgcgggctatggtctcgccgagacgatcgagattgcctggttcgaggacggcgatcatgacctcacgccgcgcaagacgatctcgggcttttcggccggcgatcacctcgcgacaatggcggcgcggctcgccggttggagcaacgccttgtaaacgcaatcatgcggttgaaatggcatttccaccggcatccggccaggcagggagcgccggccggtgcctgacgaggtcctgcctcggtgccggtcgtaaccgacgtgacacgggctctgtgcgactctctgccgtgaccgccggcgtcacagcctcggccgtctctgccgaggcatcgtcggtcagaccgccgccagggtcagccgcaccgggccgaagcgggggcaggtggcctcgagcacgatctcgccggtgaggcccgtggtctcgatccagagaccggccgtgccgccctggagcgggatggtgctggggccgacgatcttcgccgggccggtgatggccatcgtcaccacttcgttcaggaacggcaggcgctggccctgctggtcgagcgcgcgcagcacgatgcgggtggtgtcgcgttcgcgcgccttcagccgggtgctgtcggcgatcacctgcagcgttgtcggcagcggatcggcgaccagcgtcagccgcgccgcgggcgcgccgtcgacatagccggcgaagctgccgtcgatccatttctggccccagatgccgagttcgtcggcggtgaagtggcggtggtcgaagacgacgggcggatgcggcaggtgcgggaagttctcgtagtcggggccgacgcgcttggtcaccgagccgtaggtcagctcgacctcgtcacaattggtcagcacgatcaaggggagcacgccgccgatgttgcgttcgccgcgcgcccagaaggtgaccggcttcatgattacgtcttcggagggttcgcactggctggcataggcgtaagcggcgaatttcggttcgcggaacatgtccatgacgccgtgatagcagatgcggtcgccggagccgaaatccttgtgggtgttgtagtcgaacatgcaccagccgatggcgcccgctatgtcgggatcgccataggcggcgttcagcacttcgaggtggcggcggacatgctcggcctggcgcgcttcctggtcgtagatcttggtcgggtacatgtgaccgccgaattcggtgatcatgtacggcaccttgtaggagaggccggtactttcctgctgcggccgcagcggcgtgcgcgggcggttggcgccgggcagctcctcgttgccgaggatgaagtcgttcatcgtgtagacgtcctcgagcagctcgctatcggtgatatagcgaacgccgccggtcgggcgggtggggtcgagctcacgggcgagccggttggtctcggcatagaagtggtggctatcctggctctcgttgatgcgcacgccccagatgacgatcgaggggtggttccagtcgcgctcgatcatccggcggacgttgcggatcgattcatgctgccattcctggtcgccgatatgctgccatccggggatctcctcgaacacgaggaggccgatcttgtcgcagcggtcgagaaaccacttcgattgcggatagtgcgaggtgcggaccatgttgcacttcagcacggatttcatgatgtcggcgtcgcgttcctgggcggagcggccggcggcatagccgacataggggaaggactggtggcggttgaggccgcgcagcttcagcgggcggccgttcagcctgaagccttcagcggtgaactcggcggtgcggaagccgaagctggtcgtcagcctgtcggaaccatggctggtcttgagctcaaccgtcatccggtagagttccggattgtcgatatcccagagcgcgataccggtgaggccgtcgaaatcgagcgttgcgtcgtcgccggtcgtgtccgtcgcggcggtggccagcacattgccatcgatatcggcaagcgaggcggtcagcgtgccgaggaagggcacgttgcgaggattggcgagatggacgcgcacggaggcggatttttcttcggccagcacgctcgtggtctcgatcttgacattgcggatcgagacgggatcggtgaccttcagccacacctcgcgatagatgcccgcataggtcagatagtcgatggcgccgccgaagggcgggatggcggggttctcgctgccgtcgatggtgactgatatcagattgtcgccgcgctgaaggccgttggtcaggcgcgcctcgaagggcgtgtagccatccttgtgggcgatgatctcctcgccgttgagatagaccacggcgtcggccatggcggcgtcgaacacaagcgagacctcgcggccctcgaattccggcatccagcgcagcagcttctgataggtgaaggcgcgctggtagcttgcttcatcgacatagttgaacggcagctcgaccgccgtatgcggcaggttgacgatgacacggccgtcgaaatcgcgcagcagatgctggccggcaccctcatggaaagcccaggattcgttatagggaacgatggaacgcatgtcagtttctcacggcggtaacgatatcggggacggaggcgcagcggcggcgtaacaagcggccccggctgcacgttcaatgtcggttttggcttacgggtactgggcgccgttggtcgttaagtaaatggcgtagagcgattgcgtcgcggttatgaacagacggtttttcttctggccaccgaaggtgacgttggagaccgtctgcggcaccttgatcttgccgatgagggttccatcgggcgcgaagcagtggacgccgtcggccgcactgctccagaggttgccggcgacatcgaagcggaagccatcgggcacgcccttgtcgatcgagcagaagtagcggctgttggtcagcttgcggtcgtcgatcacgtcgaagacgcggatatggcgcggcacctcgtggttcgaggagcctgaatccgcgatatagagctgcttttcatccggagagaaggcaagcccgttgggctggatgaagtcggtagcgaccgcttcgatttcgccggttccggcatcgatgcggtagacgtttctggtttcctgctcgggctcggccttgtggccttcataatcggacatgatgccgtagctcggatcggtgaaccagatggagccgtcggagcggacgacgacgtcgttcggcgaattcaggcgcttgcccttgtagcgatcggcgagcacggtgatgcggccatccggctcggtgcgggtgacgcggcggccgccatgttcgcaggagaccagccgcccctggcgatcgcgggtgttgccgttgacatagttggacggggagcggaagaccgaggcgccgccgtccggtacccagcgcatgatgcgctcattggggatgtcgctccagagaaggcagttgagatcggagaaccagacgggaccctcggcccagcggcatccggaatagagttcctccagcctggcgctgcccgcgatcaggcggttgaaacgatcgtcacggatgtcgtaaagcgcatcttgcgacacaggctgctcctcccaaagcgatttgaccttcttcgtaaacgtaaacgaagcggcgtgccagagccccgccgcgcaaaaggcccgcgcctggccatttttgaagtacggctgtggcgtccctgtcggcatccttgtcggtggtcggaatcatcacaccttatgacatgagggcgggacatgacgtttgtcagctttgccgtttcgtcggccgtcaaatcacgttaaggctattctatcagacaaggtgaatgtggcatggaatacagcgatatcggtacggttgcggcgtggctgacggagcaggggctgaatggcgcgaccgaatccgagctgctgaccggcttctgcgagacctgccgaaggcttggccttccgctcgaccgtagcctggcgctgatggatacgctgcacccggttcacgaggggcgtgcttttcgctgggatagcgaggaagatgtcgaggcggagttcgcctatggcccgatgggtggcgatgggaactcgctggaaaactggcagcgctcggccttctatcatctttgggcgggcaccgataacgaggttcgccgccggctggggttcggcgatccggccgatttctacatgctggatacgatgcaggcggaagggcataccgatttcgtcgcgatggtacgcaagttcgaaaaggccggtacgatcggcgagatggattgcttcttcgcgcattttgtcacgcgccatccggaaggattttccgatcatcacatgatgatcctgcgcaagctggtgccggtgctggcgctcgccatcaagtgcatcgcgctcgggcgcatcgcccgcacgatcgccgaggtctatctcggcgaggacgcggcgcggcaggtactggatggcaagatcagccgcggcaagtcggaacggatttcggcggtgctgtggttctccgacctggtgaactacacgaagatctcggacagcgcctcgcccgaggaaatcctgccgatgctgaacgcctacagcgatcttgttatcacggcggtgcatgaggccggcggcaatgtgctgaagctgatcggcgacggggtgctggcgatcttcaaggccgatgcacccgccgatgcctgttcggcggcgctgaaggccgagcggatgctgcacgaaagattggtgaggctgaacaacgagcgcgccttcgaggagcggccgaccaccgacgtctatatcggcctgcatatcggcgacgtcttctatggcaatatcggcagccaggaacggctcgatttcacggtcatcggtcccgccgtcaacgaggtcagccgcatcgcctcgctctgccggtcggtcgatttcaacgtgctgatgtcgtccgatttcgccgccgccgttcccgagacggagcgtggcgcgcttgcctgcgtcgggcgctacgcgctacgcggcgtgcagcggccgcaggaactcttcacgctggagaccgccggcaccatccgctgatcagcgcagcactgccggtgatggcgatgtcggcggtcggcgcaatcaaattttacaagactgtcgccttcctggattagagacttatatcctcgggcgaaggggttttcgcgcctcttgaccggatgacgcggcgggtcgccgcgttggagaacactcagtccaacaggagaacggcatgcagatcaatcgcacaggttccgcacagtggtcgggcggcatcaaggacggcaagggtcagatctcgacgcagagcggcgcgctcaaatcctacccttatggctttgccagccgcttcgaaggtctcccgggcaccaatcccgaagaactgatcggtgccgcccatgccggctgcttcaccatggcgctgtcgctgatcctcggcgaggcgggctttaccgcgaccagcatggaaacgacggcgaaggtgacgctcgaaagcgtcgagggcggctttgcgatcagcgccatcctgctgacgctgcgcggcacggttcccaactgcgacgaaaagaccttcattgagctcgccggcaaggccaaggcgggttgcccggtttccaaggcgctggccgcggtgccgatcacgctggatgcgcagctcgcgtaagcggggattgatcgatggttcgagatgccgcggtgctttgtgccgcggcattttccgttcatgggtgcggtgaagacccctccccaaccttccccacaagggggaggggctaagccgtggcatcgtctgtgcccaattctctcgtaccggtggttgagagcttgcggctttaggcagggcatcgcgcccagcaagcccctcccccttgtggggaggggttggggaggggccttttgattgcacagcaacattcctcacccaccccataccgcaatgcaaaagattgacaactgtcgcctgatgccttacgactgacgaaattcaaaaatcgtcagtcgtaaatcaacacggcagaaatcatgaacgacaccgctgaaagcattctcgaagccacccgacaggagaatgccacccgcattctcgatgcggccgagcggctgtttcgtcactatggctactccaagaccacggtcgccgatattgcccgcgatctcggcatgtcgccggccaacgtctatcgcttcttctcctcgaaaatcgaaatccaccaggcgatctgcggacggatgctcgcggcgagctacgagcaggcctatgagatctgccatctgccgctcagagcgtcggagcggctgagccgtttcgtgcgcggacaatacgagatgacggtcgagaccatgctcgaccaggaaaaggtgcacgagatggtggtcgtcgccatcgagcgcgactggcatgtcatcgaaaagcatgtcgacagcattcaagatctgctggccgaagtcatccaacagggtatcaacgccggcgagttcgccgatcaggatcccgccgtcgcctcgcgctgctttggtgccgccacggtgaccctctgccacccgatcatggtggcgcaatgtcttgccaagaccaaccgcgcgacggtggacgagctgatcgatttctcgatccgcgcgctgaagaaataggcctggcgccagaccgccaggcacatcaacaaacataatcatttcaggagtgcgaaagatgatttcgctgaagacagtcaggttgccgtccgttgccagtttcgcgcttcttggcgccgtatcgctcgccgtttccggctgcagcgaagataagaaggcggagaccaaggaaatcttgcggccggtgaaggtcgtggagatcaccaaggccggcgagacccgcgcgctcgattattcgggtgcggtcaaggcgcgcgtcgagatgaacctcggcttccgcgttgccggcaagatcaccgagcggcgcgtcaacatcggcgaccgcgtccagcccggcgacgtgatcgcgcgcatcgacgccaccgactacgaactcgcgacgaagaccgcggaggcaaatctggcggccgccgaaaagggtgtcggcacggctgatctcgccaacaagcgcgcgcaacagctgttcgacaagagcgtgacggccaagtcgcagctcgagcaggcatcgctcagctacgatcaggccgtatccacccgcgacgcggctcgctcctcgctcgaccaggcgcgaaaccaggtgagctatgccgagctcaaggccgaccagagcggtatcgtcacagcgatcagcgccgataccggcacggttgtcgccgccggcacgccggtcgcgacagtcgcgctcgacggcgaaaaggaagtgcagatcgcggtgccggaaaacgacatcgccgagttcaagccgggcaagactgtcaaggcgagcttttggtcctcggccaagctcgttctcgacggcaaggtgcgcgaagtctcgggcagtgccgatgcgcagtcgcgcacgttcgcggttcgcgtgagcctgcccaacgacgatcgcgtcctcctcggcatgacggcgacgatcgaggccagcgtcagcaacgccaacaccgatgtcgccattccgctcgcggctctcgccgagaaggacggcaggaagatcgtctgggtggtcgatcgcgaccagcagaccgtgagtgcccgagatgtcacggtcgccgacttcaccggcgacggcgtcagcatttcggacggcttgaagaccggcgatctcgtcgttgccgcgggaacgcagttcatgaccgacaatctcaaggtgaagctgcccggccagcaatcggcatcggccgaggctacagccgagaccggcgacgtcgttcgctaagcggtcaggagagggaacgggacaatggacaattccaccaccgagaagaagcccttcaacctgtcgcgctgggcgatcggccatccgagcatcgcgcgcttcctgttcgggctcatcctgatcaccggcgtgctcgggctgatgcgcatggggcagaaggaagatcccgatttcaccttccgcgtcatggtcgtgcaggccgtgtggccgggcgcctccatccaggagatggaagaccaggtggtcaacaagatcgagcgcaagctgcaggaaacaccgagtatcgactgggtgaaatcctatacgcgcgccggatcggccgtcatcacgctgcaggtcaagggcgataccaacgccgctcaggtcgccgacgccttctaccaggtgcgcaagaaagtcggcgatatctccaaccagctgccatccggcctgctcggcccctatttcaacgacgagttcggcgacaccttcatcacgctgcaatcgatcagcggcgatggctacagctttccggagctgaagaaattcgcaatccaggcgcgcgacatgctgttgacgacgccgggtgtcgagaaggccgtgatcatcggcgatcagccggagaagctctatatcgacgtctcctcgcaagcactcgccgaacgtggcctgacgatcctcgacctgcagaacgccatcaaggggcagaacagcgtcgatcccgcgggctccgtcgataccggcacgcgctcggtgcgcatcgccgtcgaaggcgacgtgaccaaggccgccgatatccgcgaactcagactcaaggccggcaaccaggtgacgcgccttggcgatatcgccaccgtctattccgggcttgaagacccataccagaagaagtaccggttcaacggccgcgagagcgttcaggtcggtgtcgtcatggccaagggctacaaggtcaccgatgtcggcaaggatgtcgcggcgacctatgagcgcttcgaacaggcgctgccctacggcgtttccgtcgaccagatctccaaccagcccgatgtcgtcaccgaggcggtgggcgaattcatgcgggcgctggccgaagcgctggtcatcgtcctgatcgtctccttcctttcaatcggctggcgttcgggtctggtcatcgccatcgccattccgctggtgctggccgccaccttcgccatcatgtacgaactcggcatcgacctgcagcgcatctcgctcggcgccctcatcatcgcgctcgggctgctcgtcgacgacgcgatgatcgtggtcgaactcatggagcgcaagctcgaagaggggctggtgaagatagaggcggcgagcttcgcctattcctccacggcttttccgatgctcacgggcacgctgatcaccacggccgggttcattcccgtcggcttcgcggcatccaccgccggcgaatatgtccgcacgctgttctacgtcgtcggtatcgcgctcgtcgtctcgtggttcgtggccgtctacttcacgccgtggctcggctacatgatcctgaagcagcgccagcatgccggcggcgatcatcacgatgccttcgacacgcgcttctaccatcgtctcagggcaaccgtgagctgggccgtacgccatcggatcatcgtggtcgcgatgacgctggtgacgttcatgaccagcctctgggccttccagttcatcccgcagagcttcttcccgcaatcctcgcgtcccgagatcctcgtcgatctgtggctgccggaggggaccagcatcaaggaggtcgagaagcaggcgaaggcgctcgaagccaggatcatggacgacacggacaagaagttcgtcgccacctatatcggcgaaggcgcgccgcgcttcttcctgccgctcgaccagcagcttccgaacccgaatttcgcgcagctgctgatcatggccaatgacgagccggcccgcgaacgtttgatcgtcaagctcaggaccattctcgccgaggatttccccgatatccgcggcaaggtcgaccgcctgttcctgggtccgccgaccggctggccggtgcagatgcgcgtcatgggcccggatcgccaggaagtccgcaggatcgccgacgaggtgaaggccaagttccaggaaaatccgctgctcggcgccatccacgacgattggctggagcaggtgccggcgatgaagctggtgatcgaccaggatcgggcgcgtgcgctcggcgtcacctcgcaacgcgtccgccagatgctgcagaccgcgatgtccggcgcgccgctcgacgatttccgcgatggcgaggagacggtttcgatcgtcgcccgcgagccggaggccaaccgctcgctgctgtcggcggtcaactcggtctacgtgccgaccgacttcggcggcttcgtgccggtctcgcagatcgccagggtggtgccggtcctcgagcagggcatcgaatggcggcgtgatcgcctgccgaccatcagcgtccgcgcgacgctgcccgatggcgtgcagtcgaacgacgtggccatgaagatgtatgccgatctgcagccgctgcgcgacagcctgccggccggctacaatatcgagatccagggcggtgccgaggattcggccgaaagccaggcctcgatcgccgccaaggcgccgatcatgcttgtcgtcatcgtgctccttctgatggcgcagctgcagcatttcggcaaggcgatgctggtgctttcgaccggcccgctcggcatcatcggcgctgccgcggcactcttgatctcgggcgcgcccttcggcttcgtcgccatcctcggcgtcatcgcgctgctgggcatcatcatccgcaattcgatcatcctgatcgaccagatcgaccaggacatcaaggcgggcatgcaccggcaggaggcgatcgtcggggcggccgtgcgccgtttccgtccgatcatgctgacggcactcacggctgttctggcgttgatcccgatttcgcgcggcgtgttctggggaccactcgcctacgccatgatgggcggcatcctggtcgccacggtgctgacgatcctggtactgccggcggcttacgcgatgttcttcggcaaggagcctaagggcagggaggatgaggcttcatccggcgaggacgatgcggtggatcaccggcatccgccggcgatagcggcggagtgaaaaatgcggacggcgcggtgagaaccgcgccgtttttgtatgggattatcaattgagaactgagggtgtggccccctcatccgacccttcgg

SEQ ID NO: 38 - DNA, 45905 bp, Rhizobium matallidurans
  source 1..45905: mol_type = genomic DNA
aaaagcctgaccgagctggcgagcaccatcgcgctacctaaccaccaggcggacttcgcgacgccgatgaagattcggtgcgtgagatcctctgctcgtacgtccgacacccagggggcgacatcgttggcaaccaagagcaccgtcaggatcgcgaagaaagctatgtgaacgaagaagcgcagcgctggtctgcctctcacgactatcctcgcgatcaccaggaggcacaaaagcgcggtgaactgggcggttgcgtccgacaggatcgcgtgaatcatcgttaaaaaccttgggtgttccacctgtgaaccagcagagcgaagactgaaagcgttcttcggtcagttcgtcaagcaaatgtatttacgagatcatgcgccaatggtctgacgtgaaccgcactgggtttgtcggagaccgtttggtttaagttatgcggccatagctggtgcgtccagcatggcgtagtatcgttcttctgcctctgctggcggaatattcccaatgggttccagaagacggcggtggttgaaccagtcgacccattcgagcgtggcgaactccacagcttcgaagttgcgccatggtcctcgccgatggatgacctcggccttgtaaagaccgttgatcgtctcggcgagagcattgtcgtaactgtcgccaacgcttccgacagacggctcgatgcccgcctccgccagccgttcggaatagcgaatggacacatattgtgagccgcggtcggaatgatgaaccagcccgccacgtttaacgggtcgccgatcatgaagcgcctggtcgagggcatcgagcacaaagcccgcatgggccgttcggcttgcccgccaaccgacgatacggcgggcgaaggcatcaatgacgaaggccacgtaaacgaagccatgccaggtcgcgacataggtgaaatcggaaagccaaagcatgttcggcgcgggagccttgaagtggcgattgacacggtcgagcggacatggggcagacttgtccgacacggtggttttgatcggcttgccacgaatgatgccttgaagacccatcactctcatgagccgtgcgacggtgcagcgtgcgatatcgtaaccttctcgctgcaactgccgccagactttgcgcacgccatagacctggaagttctcgttgaacacccgacgtatctcgactttcatggcaatatcattccgttcgcgagccgataggcggtccacgtccatgcgcttggcgatagcctcataataggtggacggggcaatcggcagcagtctgcagatcggctcgaccccgagcaccgagcggtgttcgtcgatgaaggagatcatcgcttcagtgggcggtcgagctccgcctgggcaaaatacgccgaggctttgcgtagaatctcattcgcctgacgaagctcgcggttctcccgctccagagccttcatcttctccgccacgtcactcggcaaacctgcacgcttgccgctgtcgacctcggccttcttcacccattcatggagggtatgcgccgagcaaccgatcttggccgctatcgatgataccgccgcccagcgggagggatgttcggcttcatgctccgtcaccatccgaacggcgcgggcacgaacttcaggagagaatttgttcgtcgtcttgcttgtcatagaccctacttctcacgagttggggtctccggcaaacccggcgcggttcaacgtctcttcggactgaagtccgacgtgagacttttcgtggaactcaaagaccaggcaatcattttaatgcggtccaataacccgaggtaaagcttccatgaaaaaaactatccttgcgatcgctctggctgtttcgtccatcattgccgtcccagcggcttcctacgcggacaccgtcgttatccgtaccgatgacggtccccgtccgcatcgcggctgggagcgtggccaccaccgcggctgggataatgatcggagagctcgcctggtgcatgaggattttcgccgccacccgtcttgcttcacgaaacgggttgtaacctatcggcatggtgagcgagtcacgcgcacgaccaaggtctgccgctaactgaagccaagttctccccacggagccggaaaggaaatccactttccggctccgtgattttggcacctccgcgcgaggctgccatcgttggtggtgcgccagccgacgatgccacacctgaggctggcgggagggcattcatgccgcctcgcgtttcccgcgcaagccaatccttcaaggggatgtcttccatacctgctacccgcggtgttatgtcaaaacactagcgaccggacgccgctcggtgagggcaacgcccgcggatgccttggtcagatttacgcggaagctatcgcgcccgcactgttaccggcgattcatctctgctgacgcgtgccccagctgtttccggacatagcgttcgtcgacctcggccgaaacagacgaggcccgctctcagcgaatgtcaggaaaacttgaaagcgcgatcgatttcgcttggaccgccgcgaacgtccgcggccattgccgcccttctcgcagtcaatcgctttgcaaccaagcctccagggcttgccggatcgcgcgatcagcgggcactgtctggtcgaacgcccaccaggtgtgagcgccctgccagagagcggccatccgccagcccaagagctccgcctcccgcgggtcctccgacaagcgccgccctagcgccgaagccaaggcgcgaccccacgcagcgcccctttcacgaagtcttgggtttcttatgtcttcgcgcagtaaaagaagaccatcagtggcatcacgttcagccgttttgggagacataagacgcagtaggagcttaatggcgccctcaggcgttggatcctcctctttgtccgccgccattgtctccgcatcaagacgatcccaagcctgcagaagagttgcctcaaccatgcgctcacggtttccgtagcgctgcaccagggttgccgcggccaagcccgaagccttcgcggcacgtgcgaaggtcagaccgtcggggccggtcttcatcatcacctcgaatagagtctcgagtaccttctcatcggggattgtcttgcgtctcgtcataatattatataaacgtacattcatttataaatcaaggggtgacgatggctaggatagttggctacatagcagcgagtctggatggcttcatcgcggacgagagcgacgaactggactggctgtttaagtacgatggaatggatctgggggagcatgattacggcatattcgtaaacggcattcgcacgatcgtcatgggtcgcggcacctacgacttcattgcgaaggatcccacaccttgggcctataacgagcaacgggtgattgtcgtgacgtcgcgacccatcctgaatcccaagggctcgctcgagattagaggcaatatagatgacctcatagcagagcttcgtgctctcgatgatggtgatgtctggatgctgggtggggggatgctgcagatggcgttcatggaacgcgacgcgctcgatgagatcgaaatctacatcatcccagagctcctcggcggtggtcgtcctcttttcccctccaccggcttcaggtcgagtccaaggctgatcagcgtcaagaacctcgacaagggatgcgtccggctgcactaccgtttgctcgacgcttcgagctccctggcaccgctgtctcgcgccaagccagcggtcgataacgcgtgaagggtccgtatccatcaaggcgaagactggcctccactggccacgagacaaggcgggcttcagcctgacaacgacagaggcatgggcgttgttcccgccacgcgggacccaacccttaaccagcccgccgggatcgaccacatgcaggccgccggtgcgccgatgtcgctcctgaccgcctggtaacttctagccgatttgggacgtgatgtgccgaaccctttccaccttcccgcatgcaccggttccgctcgtcgacaagacggtttggcgaacggcgccggcggcgacgtgggccatctcgcggtccagatcgcgaaatggcaacgcgcgaaaggtgattgccgttgcttccggcgagcacgatccgcttctcaacgatctaggcgccgatattttcgtcgactacacgaatagggccgccgaagcagtggcgcactatatggacgagcgcaaatggagtcagcctatcaaatagactgggcggtccagccacgtaccatccgccccctgtcccggcggttcggttgaggtttgagggtgcggaaggccgccggggcgttaagacctttaggctctccgctgccgagcaagacgttgggagactatctcggcgaggaggaacccggttgaacgccctttgttccgagcactttttgacaagaccctgcttctcttcccttggcgctcccctcgtgtccagacaaggtccaaaaatgagctgtcaggaattgctattcgcatcagtcatcgcggtgtcccggccgccacgtccttcgaccccttcttcgagcagggtttcccccgcccctgatccgccgtcccgtaaattttcgcgatcggtcggcgggcagggctctgcccttaacccatgaaactggacggtcggccgccctttgcgattgtctctttcatcccccttggccaacagtttgagccgcattcgctctgcctagttcagcccgctaagttagcctccaaagatctcccggaagccgaccaccagaatggtcgcgatcggcaccgtgacgacgctgatcaatccccagaggaaaagacctgccgcggtgccgttgatcgcgaaagcgtgacgcagcgcattccggcgcaaaatccacggtgcaatcaaacccaaggaaacgccaactagccagatcacggtgatcactccatcatgttgcatcgaaaccgggtcgtataagtgtgaatactgcccttcgcaacatcttgcgtggttgtggaaccaccgccgcgttgcggtccatgatcaacgacaggggtcgatgatcgatctgggcttgcgaatttgccagtcgctctggccgaaaaatatggctcgcactatgtcgcgcgggttgtaacccgccgatcaggaagatgcgatgatcagccctcgggacttggacagcttcgagcttcgcgcgctcaagaacttggtaaatggcgaaggcgcttactgaaccgatggtcaggactgatgttgctgtcattggcccagccggtccggcgatggcaagatccgcgcctcggggcttggaaaagaagtcgtactgcaatctcgtatggccctcgtctcgttagtggagggtagagataccgggcagacttccccccatccagctgcggtagcgtgggggaagatgagaactcctcacggccggatcattaacggagcaggcgattatctgtccagggttagactgtggatagccgagagagttacagcgctcaaggcccgccacgtggcgagcaggggagacccactcggtcgatagcacggtgggcgcgatacgttccgacgagaccggtcctcgtctttggccgttcctttcctggttgaatagttccgaaatggtcgatcgagccgtgtcagctctcggtcgttatcaggggctggatcgggcggcctactatcagctcctgggtttgaactaaaccaaggcttcccgtccatgacctgtcagatgaagttttacgcttccctcgatgtccgcgaaccgcctgtcgcgataggctgtccaccgtgccggaggacgagaacgaaagtagagtgaggcagctttcgttgactagagccgcgcgaccacgcgcggctccggattgtctcgaccgctcagcgactcccaggcagcatcaggctttgtcgcaggtcgtcgatcgactgttcccgcgacgcccgttcgttcattgggcgatccccttcggacacgtcgcgctgatggcccgtcgggaccacgtcgtcaacgatatcgtcgggaaggttctcggccagatcgtatccacgcacgcgcggcgacgtcgcctgcgaggttctcgtgtagcggccgacgcccgtggcgctgcctgaggccgtctcggcctggaagacgtcgtcctcagaaccgatggcctgctggccgcctccggccgtccagccttcctctcgccagagatcagcacgctcgtccatatcaattgagccttcgtcagcgagaatgtcgtgcgccgtgtcgtaattgctctggtctacggacaccgagacgagaaaaccgccccggcggagaccttcagcgtagacgtgccggtcttcgtccgggaagaaccagtcgccgaggcgtgaccagaacccggacccttccgccgtggctgcaggtccttcgccttccgcttcgtagcccggcattaggcggacgtcggacaccccggccgacttcagtttgtcgatggccgtctcggcctcgcttcggctgtcgaagaacgctgtgagcgtgctcctggcgaggccgctggcaaaggttggcgcgccttcattgtagatgttggtcatcatgctcctcctacgtttggtgaggagccaacgggtgtcgaagctgaatgttccgagctggcttaggggtcgaggcaagggaaccgcgtctcgcacagatcgccttgcggactcgtcatgcgatcacaccccaccgcgagacgacggcgcagtcgagcaaagctggctcccgcgcccagctggtcgacgagtgcctttcgctctaggctgtcccggcgatcgcatctgacgcatatgacctcgataatcggctgacggaagtcccttagtttaggcccgggtaggttgtcgggtcgagggcgacgttttcccaatctctagtccttgcacgcgatctggcggctgattaccgcatgtacgattgacaggcaagacgtgagctgtagcctactatcgtcatagcggcctcgactgttggaaaccggatcgatggcagagtaagccacgatcgacccagatgttgccgacttttttgaaatagcatcgtgccctaagttcttcgtttatgaagcagtcgaggtcgtggcggagccaagctcggccacgacgcgatcgaagcggtccgaatgtttcgtgagcacgccgcgaccgtacagaaaacgcgcttggctcctggcgaatcttgaaaaaccgtttcgctcagccccggaatgcaacatcgccaaagcacactacgcagcggttttcggcaagttagcagcgatttccgcagcttcgagtcgagctgaggtcttgtaaggatagtgcttccagcaccaccaatcctgggaatcggctgtgcagaagccaaagccagcccagtcgccgcagtggcacttatgcgcgaccagtgttggtgcccgttgtaaagtctgtcgattgatgtcgctcataggaaactcctctcagggctggtgtgacgtcgcatgcaaattaaagatcacgatcgaatctgggcttccaaccgcgcgtcatcccttggctcattgccgcctcggccaaagccagttgcaggcgcaagtgctttatgtctcccagaagcgtcgctattgtcgccttggcatcctcatcgtggtaggcgagggccgcttcgacttcatagctgttcgccacggcttgagccgacttactgcacatgccgggcattcctcatgagcaaatagaatgccgcgatgacgtcgctctcatcgccggagtagtcgaaccacaagggcttgctcataagctgttcgtaaccgacggcgttgaagtaaccgcacgctctgccgctccttgggtcaaaaccgatatcgaatgaaccaatgggcgcgccggaacccatgtcgtacacatccacagagcacaaagcccagctcgggtagcttgggatcatgagaaggaccgccatcaaaagcggatgaacctccgcgagcgttgcctcgcgcggggttgcccaatatgtgcctgtctcttcgtcagcccgcggctgtccgctcggcgtcttggtcatcgccgtcatccccttaaagaattgaatgttcctattatgttctcttctgcggaggagtcaacaattttggcgacgacgggtgacaacgtcgacgagccccaaacctcgacgacactcaggctcctccgccaccggggatatttgtcggtctatcgtcaccagccgtaatccaagcgctgtcggcagtgccggcatttcttgcaggttgtgaagccgtgtcggcatcagtgacgtcgacggtccgcaaacgtactgatgatttcggctgaaaacaaaagtctggcgagaacgtttcgcggtccacggaatgtcaaatgcaattgcccagcgccaagatcggcgtaaggtatgctatcgcatggacgccttttgaggaggagacgcaatgttccaagcgttcgatagtcgtggcaagcaaccgctggggccggaagaattttccatggtccaaggtctcgtaaaagactactgcagcgagaggtccttgaactggcctgcgccgaagctcaagaggcagcgagagaactcctcggctggttccagctcggcgtcacggatcggaaccgcctaagggaactcttaacgtcgcgcaagacagatacggcctcctgagacggcctgaatggagagaggcgtcgcggctaaggctggaagaggccgcggcccatttcgtcgtggaccgggtagataagaggacatcctcggcgcgatcgtcggggagttaggccggctccgcggcgcgcctgaactcaacctaaacccggccgacggccgcagccaatcgatccgctcgtcgaagtcgccccaaccgcggggttggcctcccgccgcacgacaagggctcctgcgtgtctctcggacgccgcctttgcttcggcgatcgcgtccgcctcgctgcccccggcgattgtctcccaagctcggactggatttccgcggggatccaggtcgtgggcgaatatccgcgatgatgcgaacgtgcccggcatcacggggtgccgtgattcaggctagagagctgttcgatcaggtgcggcccgtcttccgtgccctcatcgtgggacgtacctctgagtttaaagcgagttcgcaacgcctcgtctgccgttgcctccacacgctggccgcagtcgccgccaagaggtgaccgctttggacgatcgtgacgttcatcggcgcgccgttgagatcgttcttgatactgggcgacgcaactctttttcctactcggaattggccgctcgcgggacccgcgcggtgtcgtccgcttcgtcgttctcggcatgggaaatctcggtcttgcgcccaccgccactttcgacatcggagggccgaggcgaaatctcgtcgtccgcccgcagcccggcggttctcaaatattctttgcgttcgtccatcgtcttcactcgcggctcgcggtctgaggggccgggatatggtcccttgcgtcagcacgacctgtctccgggtcggcatcggttacgccatcgccggcctcgcggctaccacccatgttgaccggcggagcgcgccggtcgtcgatattgctttcggggagctcgtcgtcttgggtgtcttcgttaagggacttcggaggaagctttgccgagctcggaatggaattcgatgtcatttgtgttctccttctgaaaagggaactcgcagctcaggcagcggttcccaaacgcccgtgcgcccagggcgtttgccagttggagagccgtcccgcttctaccgagttgccagatagcgatccgtcgatgcgaagagcttggcacccagcagaaattgaaagacctagcgattgcgcgcttcgcgctactcttgtcgcgtcctcgtccccggcggggtccttgaccacctcacgtgctgacatcaagtcggacacgaggcgtttgcgctcatcctcaggcaggtgagggtttgtcttccgccgggacgtccgcgcacaacgatgtagcggccatccggcgtttctaggtcgcaccgctcttggtcagggctgctgatctaacggattgacgcgccggagccgaaagaaatatcgccgctcgtcgccttcgacgaccatcatgccagcaatctcgtcgtctccgatgcgccgaaagaagtcgacgatgggctgccggtcatagaccatcgccgccgtctcgtcttcatcgactgtccttagttttacggaggcagtcgtgtcgcgggcacgcaccagcttgttcaaccgagaaaaccagtttcgagcgacggacgtcttggcgaagtccgcgaagcggatcaccgtttggatcgggaagaaggccggctcgatgggtacaaggcgtcttggccgccattgaaacagcagcgcgtccgccctgaggtcggggtgaaatttcttgccgaaccactgcaggttttccaacacgccatccaacggatgccccgatggaatgccttcaccccgccacacgccagtcaactcggtcgggataacgggcgggagcgaagcaaaccaggcgatcttttcagactgtaggccgtccgacatgccagctcctaccgttgataggtgagggcgatgccgaacaggtggggcgctcgtctgccgtttcgttggccatcgcgagaaatcggaaaaaccgcgatgttcaccatccctgttgcgtccgattgacacggcccgcgctcagaaaagaaatgtcgagccttcgagatggttcccgcaacaacacaagaacaacggcgcactataagaattggtcgtcatgaagagggtcgggatttggcgtcctcgctcgaactgagacattaccctcaattcgctctccgcgtgtccatcacgggccacacgttttggtgctctaattttcaaacacgacagtaacaccgggcttgaccatgctgctgagctcctcaacgtcccagttcgtaagtcggacacagccgtgagaccctgctttgtcgatcaatgacggttccggcgtaccgtggatgccgtatgtcggctcggaaagatcgatccagacggtacccacggggttgttagggccacttggaagagtgagctttgacttgttcttgccttgctggaagttgatttttggattgtagacgtatggcggatttcgagccacaccgttgaccttgtgctttcccgaaggcgacgggttatcctcgctgccgatggttgccggataaacggccaagaccttgtcgttctcgccgtaggcgaccagctcgccggcctttcggtgggcctcgatccgctttacgttgcctgtccggggagcgccgacaacggcgacagacagggtttcgccaggtataaaccgcgccgtggggttcagcgcacgtatcaggtccacgtccatatggaagcgctccgccagtttttcggccacgctagtatatccgagatgggccattttcgcctgctccgaatagtctttcggtatctctgggacgatgtcatcgccgtcatcggccgcgatcgtatacggcccgataacacgctggtcgtcagacagacgtgttacaatttcttcgtctaggttcccgtcgacggggagcccctgcagcagttcgaagcctgcgatggccttcctgacgtttgctccatccaatccgtcaataacgcccggcgacgcacctgcacgatctaacaagacctgaagatgtatgaccgcgggatcgggcttgtctgtcggggggtgttccagactcttctcagacaagaccgaggaaagattgaggctgttgatctcttgtggtgagaggtcatgggcgtgaacgacccccacggatgcgagggcgataactgaaccgaggacgatttttttcatcatcccgattaatcgcgcggacgcgcccgcggttccacgcgtgcgggacgaagtgctaatttctaaagaagaaggcctgaaacgttctcccctgccagttgcgggtgaaagaacaggccaaatgtaccacatgcgtgttcatgcggcatcgtctcgaatgttggtgatctccgtctccaccagaaggcacgaccgatccgcagtgcccagcaaagcgtcagcgacgttcccgtacgaaagtcgctcacctgctcgtcgactgacacccagcactatcaaattgtagtcgccactgcgcgcgcagcgaagaatgtcgagttcgggcgacgaaccctgacgcaacagcttttcgggcttgatgtcgaaatacgctgcagcggcgtcgatttgtcggaaaggatcagcctgtttgctgagttggtcggtaatccgcgatacgccctgcagtttgcgttcttctttcacgaaaaccaccgcgcagtgtccaccgcttgccttggcaacagcaaacgcgaactccgctgcccgcaccgaccgctgggtatcgctgacagcgaccagaatgcgaagtcggttacttttttctggcatttgtccccgggaagacacgatcgccgttgtgccggcgaatttctccgcggttgcctggatggtgggactgaagctcccgtctgaactcaggacgggttccacgccagcaaatagcaaatcatggcccgacttcgaaatctcggccaatgcgctctctaggtccacgtccttagcgaattccgtaacgcggagcgcagaagtctcttcgccgtcggctctgaccgtttccgacgcatgcctttcgagcatagggattagctcatcccgaaccccctccgaacctggtctgccatcagaagtggcgtcggagtccttgtcggaagagatgtccaaagtcgttaccggcatgttcctcgaagctccaagcagacccgcgattctggcagccagctggctgttcgacgatccatcagagacaagcaccgcccgctcgaactgcttcaagaagctgcctttctcgaaatcttcccgctccagtcgctccttttcctcttccctgaggggcaaccgcgccagcgcccaacgcaacgttggaggcatcgccatcgttgtaatgacggccatcgccacgatgaccgagaacaactcctcgttcaaaaccccgacggaaagaccgatcgtcgcaacgataacctcggtcgatccacgcgcgttcattccgcacccgagcgccaacgcttcgggattagagagaccgctggccttagcggctgcaaaagctccgccgaacttgccaagcgaggcaatcaaaacgacgaccaaagtgaggaggatgattttgggatcaccaaggacggtgagatcggtttgcagtcccgtaagtccgaagaagaccggcatgaatagcgccgtagtgaggccgcgtaactggacatcaatctgacgggtcaggattggggactcgccaaccaggatgccggcaacaaatgctccgaggaccgtgtgcaccccgatcgcgttggtgatcatcgccattccgcccattatggcgatgatggcactcaaaaccgggagatcgcttttgaaattgtcgttcgtccagcggatgatctcgaaaacgatacggcgtccgatcgtgaagctgaagaccatgaaagcaagggtgccggtcacgctcttcgccaaggtgagcgggtcgacggtgccggtttttgcgagtccgaacgtgaccgctatgatgatccacccgagcgtgtcgtcgataatggccgaagcgactatcaactgaccgatattccgcctcatgaaatccatctctcgcacgaccgatgcgacgatcttcaccgacgaaatagataaggccgttccaaggaacagagatgcgaccagccttttatctgggtcgggaagaaggtcggccggcatgaactggccaagcgcaaatcctgccgcgaaagggatggctattccggttaacgatacccctgtcgctgaccttctaagcttcctggcaagtgcaagatcggtttccatcccggccaaaagcaatagaaacaaaatgccgagctgcccgatcgcgttgctcatgcttttttgtgcctcgtccggcggaaacaaccgaacctgaaagtcggggaggagaagcccgaacagcgaagggccgaggattaccccggcgataatctggcccatgatagagggctggccgatcctcaccatgagttcacccaagaggcggcccgacaccacgagaacgacaatttgaagcaagaatagagcttcggacggccctgcgggcttatcggagccggccgccaacgccgcggtgacgccggtagaaagaaaagcgaaagctagtaggaagtgcagtgtagcgagaaatttgagatgcttcgtcatttgatcgctcgattgaggctgatcctaacgatcaatcgggctagacggttccatatgacatctacgcagtcgtacacacggagcgatataatagcggtcgcgggcggttcggtttttctcttcgacgatgctgacctttcgccaaacaaatatgagcttgcggaaccgcactggtaatctgcggggcatggttggaccgggcgctttccgccgatagctgaagctcgcaaacttggtgttccgaacgctatcctggatggagaagcagcggtgctggacgatgaaggccggtcggacttcggtgcgcttcagcggtcactgggtgggcgaggcggcaagctgccatcttcgagttcaatttacgtcgccttcgacctgctgttgtgatggccatgacctgcagacgatggaattatcgagccgccgacatctgcttgaacagctgcttgctgatcgcgatggactgatccagttctcggaggaaaacgacggtgagggcggcgcgatcttccgagccgcgtgcggacattgcctcgatggcatcatcttcaaggatgcggacagcgcctacaggtcgggacggactgccgattggatcaaggtgaattgcattgcctcggagagctttttcatcgttggttacgagaaaacgtcgacagcccgaaacggcctgggaagcttgctgctagtggcccgaaaatgacggacttaatatgtcggctccgtcggaacggggttcaaatacaacgacgcggtcgaactccgcgcgaagacgatcaaagccccggcgaccgccgacctagctcccaagcatcggaagatgatggaccagctaagtgccgccaagggaaaggactttgatgacccgtacctcgatatgcaagcgcaggcacatatggaggcggtagggctttttcgaacctacgctggatcgggagacaatcagacgattgtgggatttgcaaaggaaacgcttccagcactggaaacgcatcttgctcatgtggagatgctcgtggtcacggattgctacctggcggacaccccaccaggcagcaatcaggctatcgtctctgaacatatgtcccgtttgggacttggggaaaacatctcgccacaactatgtcaatgatatcccgccgtgaacatgaccttggtgtaccggacatgcgcggtaactggccagctcagctctccaggggaagccgaccttccaagctgaagcggaagccgagcggctcatactcaagcttcacgtcgccgttgaagtatggtgcgaccatccggcggatcaactgcgtcccaaagcctgttttttctggcacgacgacgggcgggcctccggtctccgaccatcgaaaactgaactcgccgctctctcgcaagctccactcgatctccacaatgccggaatcacctgagagcgctccatactttgcagcattcgtcgccagctcgtgaagcgcgagtgacaaacccatcgcctgaccagcatccaattttcgcggtgggccccttgtattgaaacgtcccactcccgaatcgtgtggcgctagcgcattggatacgatttccgtaatgtccccgacgttgccttgcgctgttgtcaggaggtcctgtgcccgtgccaacgccacaactcgcttcgagatcgcttccttggcatcgtcgagcgtgacagcgtttctcacagattgagatacgatcgcctgaacgatcgaaagtgtatttttgaccctgtgagccgcctcggccatcatgccagcacggcgggattcctccgcctttatctcggtgaggtccttcgtcaccacgccaaacccggcgatcgcaccatcgtcgtcccgaattggaaacatcgtgtacaaagccggcacaaggtcaccgctttcgaagtgacgcagacgaatttcttgttcgcagctttctccggccctgacgaccggcacgacctgttcccgaaagagaatatgatcatccggcgcgatgtaatccatcacccttggcggaagaggctcgccctgtcgcaggccgaccaactcccgggcggcgtcattcaagaacaagacgtttccgtccgtgtcggcgatgccgatgaagtccgacgcctgcctgacaacgcgctcgaaattcgccttcgcccgctcggcgcgcaccgcacgttcaagtaattcccgttgattggcgacggttcgtctcagttcaagctgggccatcgcctgacgggcgagaaagcggagcatttccacttgttcggccgtgaaatcccgtatcctgtaatcaaggacacagaccgtgccaatcggaaacccatcggtagttttcatgagggcaccggcgtaggaccgtatgtggggcgcaccggttaccaagggattgcagtccagacggtgatccgcggtggcatccggaatgacaagcacatcttcctcgagcagcgcgtgacggcaaaaagcggtttcgagtggcgttgaccgaacaccgagaccaatctccgctttgaaaaactgccttgttgtgtcgaccagattgacgaccgcgatcggtgcgccgcaaaaccgcgatgccaccgcggcaatatcgtcaaaatcctgttcggtgggcgtatcaaggacgttgaatgaccttaatgcggccgatctttcgaactcgttccatcccgcgggcacgatttcgaattccggtgagtgttcatcgagcaacttggccattccttttaatcggcgggtcatgcaatctgccgcagcttggtgtatcactgatcagccaatgcgttatctcaaaacggcgttatttgttcgttcgagaaacgggtctaatcccggaaccttgtgagcaggacgcaagttggaccgtgacgggcgcttgttgtgcatggtgatatgccctatctcctgcatccgagccgtcggaaaggaagtcgctgtcctgccgagcgacgaacgcagagtgccagaatgaccgcagtcccgaacttcgccgccattcttagtggcatgccgcaaccgtatctcgttctcgacggaaacctcgcgatcgtaggtgcaagcgacagttacttggctctgacctcccgcacccgcgaagatatagtcggccgccatatccttgaggccttcccggagaacccggacgctccgggaacggtcgagcaagggcctctcgaggtgtcgctcaagcatgtgctccagacgcgcaaggcccacgagatggcggtcacccaatatgacattcctcggttgggcggaggattttcccaaaaattttggatgccgatccatactccagttctcgacgacacaggagcggtgagtttcatcattcaaaatccgatggatgtaacggaaagcgtgttgcgaaatagggaggcggacgcgaggctgagggtcgcccttcacgctgccgacctggccacttgggaatacgaacctgaaaccgacatctggaggcgtagccaaatcgtcgaccaaatgttcggttttgcggtaggcgaggctggtccggtggcggctccgttctttgctcgcatgcacccggatgaccttgtccaaatccgggcgaacctcgcggccgtggcaggatcgccagatcaaactgccttcgttttcgattatcggatcgtgctaccggacggagcggtgcggcacattgcttcgcgaggcgaaatactgcgaaccgctggcggcaaggtaaggatgatcggtgtcctgatggacgtgaccgcggatagggtccgtcaagccgagctggaggaggctctgaaagcacaggaacgactactcgctgaactcaatcatcgggttaagaacagtctccaactcgtcgtaagcacccttcgattgcaggcgcgtcgtctccactttcctgtaacggccgccgcgtttgacgaggccatctcccgggtccgggcgataatttcagtgcacgagcgtctctataggacgggaaatgccctcagtgtcgatatggctacccatcttcacaaactttgcctggacattgtaggcgcggatcatgaaggtcgcgtgaccgtcgacgcggaggaggtcgaactgacgccggagagggccattccggtctcggtgatcatcaacgaaattttgacggccgcgctttctcgggcggagactttggacgaatacgaggtacagatcatgcgccgcggggataacggccttgacctgtctatcactgtcaggggcggcaagaagccaatcgtcctgacggatttgagtagaaggctgattggttcgatggtggctcaggtcggtggggaattcgacgatagtcagcatgacgatcgctatcgcgctgtcctcacattcccaagggaggcctgatgctgctcagggtgatgatcgttgaagacgaaatgcttctggccatggacttggaagacatgctccgagacgccggacacacggtggtcggccaggcctcggatatgcaccaggcgatcgccctcgccgagagggttcaaggcaaagtcgacgtggccatcatggatgtcaatctggctcgtggatcgaacggcattgtgacagcaggtgaactgcgccaacgctggaacatcccttcgctgtttgtctcgggcaatctggacgaagcgacgcgtgagatggctcaccagtggaacccgatcggcttcgtgggcaagccgtactccgaacgagaggtcctcacgtggctaaaaattgtctcgtcacagcggagcggagccgcagtcacagattagaagctagatgtcgacgcgcagaaaatattgggtctggttccggtggggaggcaactggatcaacttcatgtgttttaaagacgaattcttgagtctttggcggcataagcagcgcaaatcttgaaaacgccgcgcgtcggcttagcttacctatattaataaacaaaaactccacactcgatcaggccaatgaaagctattgacattttcgagccagttagccgggtcgatgacctaatcatcaaccaccgactggctaccgagacgggtcgtccaagcgacttcgagggggaggcgagagttctttctgagctcgctgagctactgaataaatctccgcgcgtcgttctgcagaagctttcggatgctatcttggaattatgtcgggcaaaatcgtctggaataacgcttctcgaaacgagcgaagatggcgacgttctgcgttggatcgcgacctccggcgggtttgcgccgatggtcggcggtacgatgccggtcgcgtcgagcccttgtggcacggtgatcgatcgcgatcaggcgctggtgatgaccgagcctggccgattttatcccgcggcccgagacttgaggccttacataaacgagatcatccttgcgcctttctatgtcagcggtcgccccatcggcacggtttgggggattttgcacgaggacggcgataagttcgatgcagaggacatgcggctcctgaggagcctgtcgaggttcgcgggggcagcctacacgcttgcagacgctctcaagcagtctcgcgatcgcgaaagcgcccttgaggacaagaacgctcagcgggtggtgctcgctcgagagcttacgcatcggatgaaaaacctactctccatcgttcaggccatcaccgcgcagagtctgcgaaacgcgcgctctgtagaggaggcccaagaagccgtcatgggacgtatatcggcacttggtcgggcccaggacattctcactcaatccgattgggttgataccgagatcgatcaagtcatctcttcgatacttgaccttcacgatagcaggtcaggtcggtttgacgtgcgcggtgatcgatccgtggtcctctcggatcagcagggcctggggctggctctggcacttcatgaacttgccacgaatgcgatcaagtacggagcactttcaaatgaggccggacgagtaatcataacgtggcgggcctcccctggcggagagttttcgctcgattgggtagagcacggcggaccgccggtggttgcgccgacgcgtaccggatttggatcgcgacttatcgaaaagatggtggccccgcactttcaagggaatgcatcgcttcattatcctcccgaaggtgcacgatttcagttgagcggccgattggggaacgaatagcagctttggccctttggagattgggcatctggatagcaactgaaggtgcgggatggcgtcagccgagcgatatcgatcgggccgcttaaatccagctacgaagtagcgctcaaacccatgagggtttgtgtcaagcggctgtcgacgggcatccaaggccgccatgtggaagcgtttgcccccaaagccggatcaccgccgagaaacgcctcttataaagtgtaagtttcttcagctagcgatcagtgaccggacttcaatggtctcgtcgaacaagtcgcttagcatgtccaatacggcataaaccctgtcggacttcacagaataataaactgcctgagcatcacgccgtgtggacaccaggtcctttgctcgaagtttggccaagtgctgggagagagcagactggctcaggccaacagtctcggcgagcttgccgacgcccatctctccatctcgtaacgtcgtcaaaacttgtaaacggcttgcgttcgccatgacgttcagaaagtcggccttttcggtgaagtaagtcatagggttccttgtaagaaagccgaactcagctcgctaataaaacgtttcccaatattcctgattcggtcaaccggtgacatcaaaactcggttaccgagtggtttccttaatcgcttgggtagcggaattgtcactcttttccggtcgacccaactatccaatgatcggagctcgttcgtttagccaaactgcacaaggcgctcgtacggacagcgtccaagcaccccaaatagagctggcgggagtagctgtagcttgaaattgatttaaggtaatctaagttgtgtacgaggaacaaatcctgcgcgacgaaggaaacccatgcgttccccacgggctacgaccttttcgaccgagctctttggaaacgaactgcccgatgcaggtttttttacgtgggaccttcccgagaacgtattgtacgccgacaacgccctggcaacactttttggcgtcgacccagccgaagcagagcagggccttccaatcgaggtttatctcgcgagggtgcatcctcaggacgcgccgatcctagcaaaggcgatcagtgacagcatcatagcacatcggccgcaacagcagtcgtaccgggtctgtaattccgagggcgtctatgtgacggtgatgtgctttggtaggggttttcgtgatgcgaaaggcgagcccgtacgatacgtcggaattgtggtacccgccgacagcgaagatgatattcggcgcgatcattgagcggcgaccaggttcatgtcctggacttgaggcggcttccacttgtatggcgcgcgagcccctaattggaaagctgcttgtcgatttcgatcttgtcgatcaccgaccatacttccacgattttcgcgttggcaaatttgtagatcacttattccgtaaacgaaatctctcgcccgctcacggggagcccgacaaagctgccgatcggtgaagctcgaaattccagacgcgccatcagcaacggcggctcgcacacgatcttcgttgcttggaagtggaggtcggggacggttttgaagtcatcgagcagcatgtttcggtagccggcgaggccgaaagggcgctcgttatgccgaacattctcatctacaaactgtccaagctcgtcccatgcttgccggttaattcaaggtggactgctcaatcgccaaagccgccttttcaccacgagataacggccatcggggtgtgagggtagtgtagggtcgcggtgacggcgtcctgtcggctcgctgttttcaatatataactagagcgtacgcacatgctggccagcgcgatgaaggcccggaaggactgctaaaccttgtcgccgcgctcgagccagctacatttagaagtcgagcccaacctttaacccacttaaaaatattttcaaccaggtcaccgccttagccgcgttcgctaccaaattgattcgtttcgctaaattttcgaatctctaatccacgccgtaagattccggtttccaaggcatcttgacgccgtcatcgatacggaacagaaagagaacaaccgagttttcacggcatgatgtcgtacctgtccaccgcgacttccagaggattcgtgaccgatgtcggctgcccgcgagctagccatcgctgaactgcgcgaacgcatctcctcgatcgagggcggcgtagcaaagaaggctggctgtctgccatttggtgtcccggagatcgatgccgtactcccgggcggcggcctggcatacggggcactgcatgaattcgccggtggtgggtctggcaccgtcgacggtgcggcggccgctctcttcgccgcaggtgttgccgcaaggacgaagggcaagatcgtctggtgcctgacaaggcccgaccttttcatgccagcgctggcgcaggcaggcctccatcccgaccgggtcatcttcgtcgaggccggcagggaggaggacgtcctcgccagcatggaggaggctctcagctacggtcgcctcggcgcggtcgtcggcgagctcgtccgcctgccaatggtgtcgtcgcgaagactgcagctcgccgcggagaagtccgggacactcgggatcgtggtgcggcgttggcgacggcagactgaagcgaacgacttcggacagccgacggcgtcggtgacgaggtggagggtgagcgcgctgccatcggacccgctgcccgtgccgggtgtggggcgagcgaagtggcttttggaattgatgagatcgcgtgccggcgagtgtgctgagtttgaagttggagcctgtgatgacaagggtcgtctcgatatttcttcccgatctttcgaccgacagggtacggcggggcgatccctctattcagcctgagcaggcgatcgccgttatcgcgaggtcgggctcgaagcgctgggtcgccgccgccgacgctgccgcacgcaaggctggattgcgcgtcggcatgcctgcagcgaaggcgcaggccctgttccaggggttgatgatggtcgatgccgacccggccgccgacgcagccgccctcgagcgtatcgcgctctgggcgctcggcatctattccccgatcgtcgcggtcgatggcacggatgggctggttctcgacaccgaaggcgcggaccacctccaaggtggcgaggagccgatgctgacgggtgtcgccaatcgcttccgcgcggccgggctgaccgcctgcgtggcgattgccgacacctggggcgcggcccatgcttgcgctcgcgcgatcacccgagagactgtgatcgttccccgtggcgagatcgttcgcgccgtcgaaaagcttccgctatctcttcttcggcttcccccaaaggtcgtcgatgaccttcgggttcttggtttcaaattcatcggcgagcttgccaacactccacgcgccccacttgcgcttcgcttcgggcctgaacttggcagacgcatcgaccagatgtatgggcgcacttcggagccgatcgagcccatccgatcacccgaatggatcgaggtgacccgccaattcgcggagccgatcggcgctgccgagacaatcaacaggtacgtcgggcgacttgtcgtggaactggtgggcgaactccagcgcaagggattgggcgtccgtcgcaccgacctcatcgtcgagaaggtcgacgggacgcgccaggcgatccgcgccggaacagccaagccagcgcgcgacgtgtcgtggctcacaaagctcttcaaggaccgcacggagaagatcgagccgggcttcggaatcgaacggctgacgctcgtcgccgtcatgtcggaaacgctcgaggaggaacagcgctcgtcgtcgctcgtcgatgatgacgacgatgacgtcacgccgctgatcgacatcctcggcaaccgcggcaacagggtctatcggttagctcctgtcgcgtccgacgttcccgaacgaagcttccatcgcatcgccgcggccgcggaacccgtcaacgagacttgggtccacgattggaagcggcccgtgcgactgctggaccgcccggacgctgtcgaggtcatggctttgatgcccgaccatcctccggcttggttctcatggcgtggcaagcgtcgtcgcgtgaggtgcgccgacggccccgagcgcgtattcggcgaatggtgggtccgcacctccgaggccgatgctgttcgcgactacttcgtcgttgaggacgacgctggcgagcgcttctggctctaccgctcaggcgacggggtcgatgcgggcacgggctcgcacaagtggttcatccacggaatcttcgcgtgaagggcagggacgtgtcatgaggtacgcggaactccaggtaaccacgcatttctcgtttcttcggggagcatcgtcggccgacgaactgtttacgacggccaaggaactaggcatcgatgccgtcggggtagtcgaccgcaacagtctggctggcatcgttcgggcgctggaggcctcgcgcgctacgggcgtccgccttgtcgtcggatgccgcctcgacctgacggatgggacgtcactcctggtctatcccaccgaccgagcttcgtactcccggctgacccgcctgctgacgctcgggaaatcgcgcggcgggaagggcaactgcatcctgagcttggacgatgtcgcgctctacgccgaaggacttctcgctgttctcgtacccgaccttccggacgagagatgcgcagtccagcttcgcaaggtcgccgacctattcggcgatcgcgcttacctcgcactttccctaaggcgtcgcccaaacgaccagatgcggcttcacgagctgagcaatatggccacgaagtgccggatccgcaccgtcgtcacgaacgacgtcctcttccacgagccttcgagacgccagctccaggacgtggtgacctgcatccgcgagcacacgacaatcgatgacgtcggcttcaagcgcgagcgccatgccgaccgatatctcaagcctcccgaagagatggcacgtctgttcccgcgatatagggaagccctggcgcggacgatggagatcgtcgaacgctgcaagttctcgcttgaagagttgacctaccaatatcccgaggaggcgatcgttcccggcatgaccgcccaggaatccctcgaacactatgtgtgggaatgcgcccccaatcgctacccggagggcttgccgcctgaagtcttgaaaacggtccggcacgagctcgatctcatcaagacgatgaagtatgcgccgtatttcctgacggtcttctcgatagtgggctacgcgcgttcgcaaggaattctttgccagggcaggggatcggcggcgaactccgccgtttgctacatactgggcgtgacgtccatcgatcccagcacaaacgacttgctgttcgagcgttttgtcagccaagagcgcgacgagccgcctgacatcgacgtggacttcgagcacgagcgacgcgaggaggtcattcagtggatatacaaaacctacacgcaccagaaggcggctctctgcgccaccgtcacccgctaccgtgccaagggcgcgatccgagacgtcggcaaagcgcttggcctgcctgaggacgtcataaaggctctttcgtcgggaatgtggtcgtggtcggaaaaagtcagcgacaggaacgtcaaggagctcaacctcaacccgaacgaccgtcgcctggtcctgacattacagctcgcccagcagctcatgggcgcgccccgccatctcgggcagcatccgggcggcttcgtgctgacccatgaccgcctggacgatctcgttcccatagagccggcgtcaatgaaggatcgacagatcgtggagtgggacaaagatgacatagaggcgctcaagttcatgaaggtcgacattttggccttgggcatgttgacctgcatggcgaagtccttcgatctaatccgagagcacaaggacgacgacctcgatctcacgaatatccgccaggaagacgcggcgacctatgcgatgatccggaaggctgacacccttggtacgttccagatcgagtctcgcgcgcagatggcgatgcttccccgtctgaagccaaggaccttttatgacttggtcgtccaggtcgcgatcgtgcggccgggaccgatccagggcgacatggtccatccctatctccgccgccgcgagggcaaggagaaggtagaatatccgacacccgagcttgaggccgtcctcggcaagacgctcggcgtcccgctgtttcaggagtccgcgatgagggtcgccatggtttgtgctggcttcacaggcggggaggcggaccagctgcgcaaaagtatggcgacgtttaagttcacgggcggggtgtcacggttcaaggacaagctcgtcggcggcatggtgaagaacggctactccgctgaattcgcggagaagaccttctctcagctggagggcttcggcagctacggatttccggagagccatgccgcgtcttttgccttgatcgcctatgccagcaacttcattaagtgccatcaccccgacgtcttctgcgcggccttgctgaatagccagccgatggggttctacgcgcccgcgcagatcgtgagcgatgccgccaagcatggcgtggaaatccgtccggtctgcgtcaacaattccaggtgggactgcacgctcgagcgcatcggtaatacggaccgccacgcggttcgtcttggaatgcggatggtgaagggcctcgccgtcgccgacgtcgcccggatcgtggccgcgcgcatgaacaaggatttcgaaaccgtcgacgatatgtggcggcggtctaatgttccgaccgaggcgcttgttcagcttgccgaggcagacgcgttcctgccgtcgctcaagctccagcgacgcgacgcgctctgggcgatcaaggcactccgcgacgagccgcttccccttttcgcggccgccgccgagcgcgaagcggccgtcattcccgaacagcaggagccggaagtcgaacttcggcaaatgaccgaagggcacaatgtggtcgaggactatggccatgttgggctgacgcttcgtgagcacccgatcgccttcctacgaaaagacctcgagaggcggaacatcgtcacctgcgcggacgccatgaacgcgcgtgacaaacggtgggtatgcaccgccgggctagtgctcgtccggcagaagccaggcagcgccaagggcgtcatgttcatcacgatcgaggacgaaacggggcccgccaacgtggtcgtgtggccctcgctgttcgaaaagcgccgtcgcgtcgtgcttggcgcgtcgatgatggcgatccacggcaaaatccagcgtgagggtgacgtcgtgcacttggtcgcccagcagctcttcgatctcagcggagacctgtcaggacttgcggatcgcgagatcgacgtgaagataccgacaggcaggggagacgagttcgctcatggatcgccgggaagtcctgactcgagggatcgcccaaggcctgtgccgcaggcgcgggatatctttgtgcgggacttgcacatcgacaccctcaaggtgaaagcaaggaacttccattgacgagcgggatggcatggcactggccttatcgctcaagggaaatccactagcttgctcaagtctcggtttcaaagaggatgcccaagcagggttctcgcaaaaaactgcttgttgcattggcgatgattgccgccggcgtcatggcatttttcctactcctctatctgaccgggcacgagccggacgaagtccattgacgctgaccgaatgggtcattggcgggattttgatcgggccaggcttcggctatctcatcagatggcggcgcgaaagggagagccagcgtcgcgctcagcgaagcaggccgtcgatgtcgaattcgtcccaacctcgtagctgcgatgccgcgtcatctggctcctctcgctttgcttccttcgtcttggcacgcgtcttgagggacctcttcaacttcgcctcgtaagccttcttctgacgtttctcagctttggcttcggcatcttcaacgcgccactcatcgacaacacctcggtcgagcaagtcttcaacaaccttaggatcgaagacgtggaacgtgatctgccgagcgcgtccgttcaaccggacggttcgggttcccgcacttggaagtcggccgtccgccagccatcggtgcctttcggtcggcttgatcgttagaatgtcctggatttcgcgtgggattaccggaattgtctcggcctcggctactgtactcgagatgatcgacgaggcggcgtggaaaacagccttctcgctggccgacaacgccaatgttagctcaacgccatccaacgagatggacttcttagaagcagcggggagacgagcctgaatttcctggagtatacccttggcgcgcaccgcggaccctaaagtcgcggacgctggcagcgtccacccccggatgagttcgacgtcgttcttctcttttttgcgcatcccgaatagatggtgtaggtctcgtatatcgtcaatgcggcgttcagttctgctaggccatgccacgggcgacggcatacccgcaggcgcttgcaacgctcgttagaacggtcccccagatcatgtcgacaatgctgaggctagcgggccatcccttcaacgtcgaaaggttggtcatgtcgtaggtgccgtacgcggcaagcccaaggaccgcaccgtatccgaccgcgccccacacagaacctgccggccgcaccgccagtaccacgatagcgatcgtaaacaagacgtagaaggctgccgcgataacgaggttgggagagggaagcatgaggtcgccgagctgctggcgatagaaattcttggccaccaggcccagccacaccgcatccatgaggaggaaagaacgttgaagcgcgtcgacgaaagcctcaaccgatgggatcgtcttgcgcagattatgcctcgcacttttgacactggagatgagcgcttccggaaacgccgcatgcagatcggtgaggaaatcatcaggcgacttgctggttacaccatgggcgagaaggtctctcgcgggaaagtccccaggttccaggtgacgataacggaggccttcgctgaagtggcggctaccagaacatgccggtcatcgggatccggtaacgtgagttcgtgaatcaacgggcgatagtgcgccaccactgcctctgggaggaccgcgttcatccggtcgcgcgtggcttccaggcggtcgatggacaaacctggtgtgttggcggcgagattgcgcatccactcatcatgtatatcgtcggtccagcgcgccccgacgagaccgtcgaaggcgcactggatcagaatgttgcggaagtggaaggggtagaggacgcaggcatcgtagaccgcgacggccggattaggggccatgggtctcgatcaggtcctctgtgtcctcggcaagtgcttccattgccgtctttcgtttgtcgagcttcgacttcaacgcgagcacatccttcaggagggcgcgacggtgtttgccgacgtaacggaatggcagatcgccccggtccatgcgcaagacgacgagcggacgagagatgccgagaatggctgaagcttcactcgggctcagttcctggtcctcagccagtacggcaacccgctccccgcgcagcatgtgcctcaggagggcctcgacggctgcggcggccgagggcgggatcgggagcgtgcgctccttgccgcctgcatcacgaacatggagttccagcctgtctccggcaaccaactttggcaaggacgtcgctgttttttggtcgcgatctgacagcctagcgaactgaacaatctggctggccatgatgatttctccttggccgcaaatacagcgaaagagacctgtaactgcaataactgaaagttgcggattgatacaccaagcttgaggctgcggttggtcctgaaggtcttacgacccggatcacccgcccggcgggtctttcggctttcaagacgccccgcatcaggtcaggcgctccatcgacattttaagtgctctggtcgggtggcggaacaatccggcgagccatggatttacacgccatgccgtccgaccgtccgcgctcagcggattgcctctccgggtttgtcggacggcatcgctatcgcattggagttttgctggctatcttgtccctcgagtggcgcccgccactttaacccgcaatggacgtgcttccgattttcccgcaacactcgtgtccccccctccagccacgctccacggatccacgggcccccatgaaaacgaatgttctccccgaagatcgcctgcgcatactacttgcacataagaaccggaaaatggcggcttcggcccacgcctacgttcgggggagcaccaagcggttttacgaatggcttgatcgagccgatcgggtcgagcttccgtccgggccacggctatggatctgcggcgactgccatgtcggcaatctcggccccgtggggagcggaagtggagggctcgccattcagatacgcgatctcgaccagacggtggttggaaatccggcacacgatctggtgcggctcggcctatccctggcaatggccgcgcgttcctccgatcttccgggcgttgtcaccgcgctgatgatcgagagaatggtcgagggctacgcctccgcgttccggccggacgccttaccaggagccgatgtcgcgactattccgaagaccgtcgagcacgccctgcgcgcggcggcgcgtcggtcgtggaggcatctggctgacgaaaggatcgaaggcgaggccgtcctgcccctcggatctcgcttctggccactatccgaggaggagcggcgagaggtcgacagcttttttgggcgggacgacgttcgtgaactggtgacaatcctacggcacgggaaagatcttgagcgggtcaaggtcaaggatgcggcgtactggcgcaagggctgcagttcgctggggcgtctgcgcatggcggttcttctccaggtcggtaggggcgatgaccgccgctattgtctaatggatatcaaggaagcgacttccgccgccgcgccacatgatccagacgcgccgatgcccgaggatcccgccgcgcgggtacggcagggagcaaccgcgctgtcgccatatctaggatcgagaatggtcgtgggtcatcttctcgaccgcccagtcttcgtgcgcgaactgctgccacaggatcttaagcttgagatcgaggagctgtcccgggacgaagccgtggccgtggcgggttttctcgcgcgcgttgtcggcacggcgcatgcccgccagctcaacgccgtggatcgcggccgctggctcgctgaactggaaagacagcatgatgtctcgatcgaggcgccgtcctggctttggaacgcggtggttgatctggttgccatccacgaggccgcgtacctggaacactgccgacgtttcgcgctgagggcctcgcgcggccggtcggatgcggtcgacgaagaagagcctgatggtgcgtcttagaccgttgagatgccgcatcaatgaacaagcggtcgggcaatttggcgggcgcggcctccacattgatctcgatttacgtcgggattgccggggacacatgtgaacgcgcatcctccgctccggttcattgaggacgacgtcctacggcatacgaggaaacggcactggtcgcgtttcctctaccccctggtccaatgacttccactgcccgcccggaaccgattgtacccatgcgagtttcaacgtgatcgaaacggggaaaaagatggcaaccacatcaagaggccgcgcgcgagatcgtgctctcattgccccgggccgggaccaccacatcaaatatcaggccaagaaggaacgcgtccccgagggggcagccaaatatgcccccaaagaggcgggcaatacgcgcgagaacgtcggggccaaactcgaatgcgaatgaaagccatttcagacttgagcagacttcccccactcgaacggcgcgctgtcctggaaggattggcggttacgctggcggataccgctgaattggcggcgtccgaaggcgaagacgcgctcgagatggtcatgcgctcggtgggagtggcgctgcgggaggccgcgggcgatctagccgctaccgacgttgctctcgccgaggatgtggcggttcgtgcaatgagcctgatcatgacgttccatgcccgccaccctcatttgtcattagtgccgaccttgcactaaggatctttcgagccaccggctctcgatccctcgatccagagtcgaacttgcagacaagctcgtccaagccgtcgctggcaagcgaacctcacgtagtcgacgccattgcgcgactgtacgatcgcgcggaatatcctctccaaagacgttcgatccttggacccgccaccctcctggagatgcagcgaagctattcacgcgttcacccgcgatcccagtggcgttcacactcaggactttcatgcggttttcatgcattcgcggcggaagtacgtcgaatatcgcgactttacgataacttacctgtcggcgttcatgcaggctggcgtggggcgaggcctctgacgcgcccgctttgccttttcgcgctttgctaggtatcgtcaagcgacaacctctgcgcgccgattccatgactatccttttcaagaccacaatctccgaaagcgctgcattcgagttgatcgagcaggcgattacgccaggccgtccgtgtgacggctacttcaacgccgtgagtgacgccggagagacaacattggtctggtcgccctcgaagagtgcggaggagtttttagccgaggtaagggaaatgctgcgcctcacatgggacgtcgcccgcttctggatcatatacgaacgacgcgacaacggccgcgatccggcaccgacagaggtgcgcaatgccgccttccgtctgacccgtggcttcaccggtgtcattatcgcctcactgagcatcctgggaaagcgcgatgccgaccatgatctggagttggtctttgtctgcttcgccgacgacttccagcgtcgacacttccgtctccgatatgaaggcaaggcgatctcggcctgaccaagctggcaaatcagggaggagtggagttaaagggaattctcaataaggggattcggactaccaggacgaggcggcgttccgttgctcttttcgaagcagtatcggtcgttgccaaaaaaattggtcggcggacggattttctatcgcgaacccaagcgtttcccggtcgccagacccacgtcgcgacagcgcggggtcagcccatgccgcgatgagcgattaccgcgaactcgatgaacccccgccctttgcggcgatggacgatacggggaggcgctccgggcgatacctgatccgacgcgggtcggctcccacctgcgctacaaggtcgacgtcgtcgaggtgatcgggcacactgacgagcagcgcgttgccagaggcacgttaagcctggacgatgcctcgatcggtgtcatcgacggccgactcccggtcgacgctctccagccggccgataacgccggactcgggcttgccgggcaatcgcggttgcaattgtcttgaaggccaatgcaaacctaaaggacgtcacggtgtcgccgatgtcggcggcccagcttgtcgtctgaggtgacaagctcaccgcgggacaagcagggatgtccaagagcgtcgacgcattgaaatccggatacgcggacgggcggaaccgctccagccctgatcttcgagccggaaccatttggccgcggcgtcatttgatgtggagatttcacgtcgcgtcaacggagcttgaaaatgtcccatgctaatagtggcagcactcgatcgactaccaccggaacaaagtcttccaaccgacagttcgctcaaggcggcaatccagactacggccaggcaacgcccaaggctagcaatgttcccgagaaccgtgaggtcgatgaccttacgctgatgatgctgcaggcgagggaagggcgcgcctaggccattgcgcatgccacaagccccgtccaaagctgggtgcaagaggctcatgcgaggcatgtcccggctggccagtcggcgcaatgggaccagcatcatgatgcacgctctgagagtttcttccacaattccctgtggtaggtgaataagagcatatgcgcccgacgcggcggccctaccttcttacctcaccccgacaacctcgctccgttgctcgcgtcgaagaggtggatgttcccgcttgcgcagctgaaatgcatcgtgtcgccgacagtgagctcgctgtttcgcggaaactcgacgctcaacattttcgagtggccgatttcgacgtagccgtaagtctggctgcccagtcgctcggcgaccatcaactcaccgctgaaccaggcgtccttttcggaacatagattgagatcttccggccggacgccaacaacaacgtcccgggtcgagggtgctgacgcaccgggcaactgaagcggtagatgccggccaaggatctgaatgcccgcgctatcggctgccagcgtcgcgggtatcgtattcatggtcgggctgccgatgaagcgggcgacgaagaggctggagggcttgtggtagagatcgagcggcctgccgatctgctcgacgacgccggcgttcatgacgacgatgcgatccgccagtgtcatcgcctcgacctggtcatgggtgacatagacggtcgttgccttcatgcggttgtgcagctttgcgatctcgagccgcatctcgacacggagcgcggcatcgaggttggatagaggctcgtcgaacaaaaaggccgcgggctccctgacgatcgcccggcccatggcgacgcgctggcgctgtcctccggagagttggcctggacgccgctcgagataatcggcgatcttcagcacatcggctgcctgtcccacccggcccgatattcgatcgtccttctcgccccgcattttcaagccgaaggacatgttctcgcggaccgtcatatgcggatagagcgcgtagtcttgaaacaccatcgcgatattgcgctcggccggcgccaggtcgttcacgcgtgcgccatcgatgatcaggtcgcctccggatatctcctccaagccggcgatcatccgcaggagcgtggatttcccgcaaccggatggtccgaccaacacaaggaactctccgctcctgatggtcacgtcgatgtcgtgaatgaccttcagcgcgccgtacgacttttcaatttttttcagttcgattccggccacatgttcctcccagatcgaaatttctcacttgacgctcattatcgagatcaatatcgataatgatacttgattagattggcaactcttcggaccagcacatggcatattttcctcccaggcagacagcgagcaggccggcaaaggcgggggccgccttcgatgccctgaagcgcgacatcatgctcggcgtactggagccaggcacggggctcaccgagctggatctggccgcgcatttccaatgcagccagggcaccgttcgcgaagcgttgctgcagctacaggaggagggactcgtgttgcgaaaggggcggcgaggcacgcaggtctcggaatgcaccgaagacgaggcaatcgaaatgttccgccttcgccagcagatcgaaggaaacggcatggcgcgtgtgatgcgggcgccgagccggacgttgatcagggatctgaacgagctgttcgagaagatggtgtcggcggcaaggatgggtgacgaactggagctggccgccttcgacagggatttccatcgccgcattttcgaggacgcaaaccttccggccctcgacccgatcctgcatcgctgccttgttcataaccatcgcttcaagatttcccgcagccccgcggcccgggatcttgccgcaacggcggagcgccatcgcagcattatcgactgcatcgaaagcggcgacgcgcttcgagccaccaaggcaatgcagcatcacatcgcgacgattgtcgatcttggccccgaggtgtttccggaggcgacgcagtgagctcgtcagtggatttgtcgggagaactgtccgaggagtcgatcgccttgatcgaggcggtttacctggaactcggtgctctgcccgatccgacgacgctgccgcccgctgaagggcgtgctcaatcgctcgccgcaaacgcgcggtgcaataccgatttgccgagaatggatttcgccggcgatgtctgggtggacgaagacgcgagcctgggagcggcgcggacccgtctcaaggtgctggttccgcgagacgctcgccccggtgtcattcttttcatccacggtggcggtttcgccttctgttcacccgaaacgcacgaacgttgtgcacgggtgctcgctgtcgagagcggaatgcccgtggtcctgccggattaccggttggcgccggaagatccgtttcccgccgggctcaaggatgtcgtctcggcgctgcgaagcgtccttgccgcgacgaaggaggcaggcgtcaggagcgggccggttctgatctcgggtgactcggccggggcgaacctcgcattggccgcgatgctgcacgagcaggcaaccggcggagccaaggccgatggcgccttgctgttctacggaaattacgcccgctcgttcgagaccccgtcctatatccggttcgagaatggccccggcctgacgcggccgaaaatgcagcgttactggagcttttatgccggcgggcaggcgattgacggcaatcccctggcttgcccgctgatggctgacgatgccgacttggcgtcgttgcctccgctttatctcatggcggcggccgtagatcccctgctctccgacacacttgagcttggccggcgcctttgggcgcttggccgtgacgacgaactgcaaatcgtcccgggcgtcatgcacgggttcttgcagaacactcgtgaactggccgcggcgcgggaggcgcttcatgcggcgggaaatgcggcaaggcttctgaccggccgccaatagcgttataataagaggaggaaggcatgaaaattctgaagactttggcgctcggcgccgccttgactgcttcggccgcctttagccaggccatggcggcggagaccgtccgtttctggtaccatttcgacaatcccgccaatccgatgtcggatctggtgaagaagttcgaaacagcgaacccggatatcaagatcgaagcggaaaacgttccatggaacagctattacgacaatctctacacgtcgatcgtgggcggcaacgcgcctgacgccgccatggtgaagctgttcgcacagccgaggctcgtcgagatgggcgcgctggagccgctcggcgagcggatcgatgcctggaagggcaaggccgatttgctcgacaacctgctcgagctgaacaagggacctgacggccagcagtattatctgccgatccagtatgtcgttctctacctctattatcgcaccgacctctttcaggccgcgggcctgaaaccgccgaccacctgcgaggagttcagggacgacgcgatcaagctgacgaaggcaccggatacctacggcttcggactgcgtggggggaagggcggatgggaccagtggggctcgttcgtcatgtcgcaaggcgctgaactgaagccgggcggtctgacgaccccggaagcgatcactgccaaccagtgggttgtcgacctgttccagaaggacaaggtcatccctccctcggcaccgaacgacggcttccaggaaatcatagccgccttcaaatccggaaagacggccatgaccatccatcacatcggatcctccaaggatctcgtggcggcgctgggcgataaggtatcagccgtgccggtgccgaagtgcggcaagggacagtggacatcctacggcgatgaatcgctggcgatcttttcgtcgtcggcggtgaaagatgcggcatggaagtggatttcctttctcgcagagggcgaaaacaatgtcgcgttcaacagtgcgaccggccagatgaccgtgaccaagagtggttcggcgaactggaaactgcatgagcgccgctttgtcgacgcgacggtgcagtcgctgcccttcgccaaggtactgccgcagacgtcggccgtgacggagttcgtcaacaccgcgtggcagacgaacatgcagcaggctctcaccggacagatcaccgcgaagcagatgatggaacagttgcaaacactcttcgccgagtagtccatgggcgacggctccggtttattccggggccgtccaccgcagttcgtccccggagccgatcatgtccttatcgacgacctctcccccgatgcgccgaagccgaatccaatggcgttcggaacgcgtacttccatacatgctcttggcgccggccgtcttcgtcacgctcgtcatcgtcttcatgcctatgatccaggcggtatggacgagcttccacgatctcgtgctcttcaggccgaatgccagcaagttcgtcggcttcgcaaactatgtgaagctgttcaacgatcctgtcttctgggtggcgctctggaacacgatcatctggatcggcctgaccgtgccgctacagatggggctcggcctgttgacggcgctgctgctcaatcgcgaatttccgtggcgaggtctcgcccgggcactgatcattattccctgggctctgccgagtgtcgtcatcgcgctcatgtggcgctggatctacgatccgaataccggcgtactcaacgacatcctgatctacctctcgatcgtcaaggcagcggttccgtggcttgccgatcccaatgtcgcgatctacgcgatcatcgccaccctgacctggcagggattcccgttcttcgcggtgatgatcctcgctggcctgcagggaattccgaaaagccaatacgaggcggcgtcgatcgacggtgcgtctccgtggcgtcagtttcttcacatcaccttgcccgggatcgcaccggttctggcgactgccgggttgctccgggtgatctgggtcgccaattcgatggacgtgatcttcgttatgaccggcggtgggccgggctacgcaacgcatacgttgcctctctacgcctttatcaaagcgcgccagaatctcgattttggctacggaacagcaatcgccgtgaccttcacccttttcctcggcgcattcgtcgccgtctatctggcccggacgatgcgggaggtgcagaagtgaaaaaacccggaacccttcggcgcatcctgacgaccgacgtgccggtcgcgttgctggtgatcttcgcaatggcgccgttcgcctggatgatcctgacgtccctgacgccgaccgcggcgctcaacgccaacggagtgtcgttgtcgccggcggcatggagtggcgacaactacgtcaggcttttcgagcagacgtcgtttctgaagaacatgatggacagcctgatcatcgccggtgggactgtcgtcgtcggcctgatcgtctcggtcacggcggcctatgccttctcgcggtttcgctttcccggccggaaattgttgatgctccagttcctgctgatcaacatgttcccgatcgtgctccttattcttccgctattcgtgctgatgagaaagttcggaatactggacacgcatcttggcctgatccttgccaacgcgaccgtcgccattccttttgccgtctggatgctgacgagctatatcggggcgatcccgaagagcctcgacgaagcggcgatgaccgatggtgcctcgcggctgacggcgttgcggaaggtggtgctgccgctgaccatgccggggatcatctcgacaggcatctatatcttcatcaccgcctggaacgaatatctctacgccctgacgctcggcggccgaaacgtgcgccccgtcaccgtcgcgatccagaccctgatcggagaataccagatcgagtggggtctgctcgcggcgggcgccgtcgtcggcgccatgccggcaaccatcctcttccttctcgtgcaacggcgcctgatcggcggcctgacccagggggcagtcaagggctgatgtccatcgattctccatacggttcgaaagttcgaaccccgctcttagaaaggaatggcgaatgaacccgatcgggttgatttcaatgcaatatgcgcgacctttcacagccgagcattttcagctgtttgcgaagatgcgcgaacacgggtttgatttcgtggaacttctcgttcccgaggtcggtgagctcgacatcaaggagacgcgcaaggcacttgaagacgccgggctgggcgtagtgctcgcagcccgcgtcaacctccagcgcaatctcgcatcggccgagatcaaggctcatcggtccggggtcgaatatctcaaatacacgatcgattgcgccgcggggctcggcgcgaagatcgtcggtgggccgctgaccggcaatcccctggtattcgcgggccgaccgccgcagcctgtcgacgaaaccgagcggctggcgcgcaaggatcgctgcgtcatggggttgagggaggcgggggaccatgcccgcaatgccggcgtttcccttgcggtcgagccgctcaaccggttcgaaagcgacgtcctttgcacgacgcagcaggccatggaactgctcgacgctgtcgatcatcccgccgtgaagcttatgctggacacgttccacatgcacatggaggagagctcgctcgccgaggccatccgactcggtggtgatcgcatcgtgcatttccaggcgaacgaaaatcaccgcggctttcccggcaccggcatgaccaactgggtggaagtctgccgggcgctgcacgaggttggctatactggcccgatatcgcttgagcctttccgacgtacggacgaccgtttcggcgtgcccttcgctcagtggcgcgcaccccacgaagacgagagcgatcgcctctcggcatcgagcgccttcatgaaatcccacctcctgcttacggaatatcgtcgatgaccatgaaaatcggttggatcggttgcggcattcacgcaacacaaatgcttctcccgcagctcgtccgtcatgacgtacagctgatcggactgtgcgatattgacggcgcgcgcctgaagagcgccggccgccagttcggcgtcaccaatctcgtgaccgatgtcgaggatctgctgcgcacgcctggcctcgacgccatcggcatggcggttggcccggaccagcatctggccttcggcaaggcggcgcttgagaggggcttgcccgtcttcatggaaaaaccgccatcgggaagcgcggcaggcgcacgcgaactgctggccgcctccgagaaggcgaggaagccgcttctgctgggcttcatgaagcgatactcgatcggcaaccggatggctgcgaacatcgtcagatctggccgtttcggtgaggtgatgggactaaccggctattatatgacggcgcccggatacttcgccggaaacgtcgattacaccggcttcttcctgcaccactgcgtccactatatggaccttgtttcattcctcgtttcgccggtgcgcgccattacggcccgcaaggtcgagaaaacgcccggccgcgtgctcttccatgtcgggttcgaattcgaatgcggagcgatcggcaacattgcgatggggaccattcagtcccgcggaacgccggtggagcgtattgagttgatgagcgatcaccagagaattgaggtcgacgacgtgatcgagatcaaatggcaccgcgatcccccattcaagatcgacgacctaggcgcgacgctcaaggacgatagcgacacgctaacgtggaagccaaacttcaccgcggcggcaaatgaagatccgaagggttatcactcactactggcagatgttgttcccgcgctcgccggtgcatcaactccggcgcctggtattgctgacggagtaatcgcaatggaacggctggagacgcttcgagcagctctcgacatctaagctcaggcttaaatcgatttgatccgcgatacagattctctgttcgaggctccgatggacgaattgttttcgctgagcgcggatgcttctttcgagcctggttagtttgcctttcggtaagcagttgaacatcagcctcttctccgtggcttagatatcaacggccggcgcattcgttcgcaattctcgcttcggcccggcagcggagatttttcaacggcgccacgacagcggcttgtccattacctgcttgcaaccaacggcattgaagtagccgcacgtcccgccgctccttgggtcgaagcaatatcaaacgagccaatcggccgcccgaccccatgtcataggcctcgaccgataagacagaccattcctggtgccctggcatcatgaggagaacgcccatcagaggcggatgggcctcggcgagagatgcctccctcggggtcgtccaataggtccctatctcgtcttcagcccatggcttcttgatcggcgtcctggtcatcgccagcatcctttcctgttctttttatgttctccttcttgccggagccaatatcttgatgaggacaagacccggacgcctctggaggagagctccgtccgggaccgtaccaacacgaactcgatgctttgctagaccgctccgctccctaaatacagttgcacatgaatgtttagcgtcgcgaggaggataggatgccgaataatgcttggaatgcaccagttgccgtcgatttcccgcaccaggagcggaagatagttggcggtccgtttgaagccatgacgtgccttatcgaccgatggcccaatatgagcggtctcaagtttctgcgcgcccgcatggcatgcaaggctgcgctggacggccgcatgagcgcggatgccgcccgcgtgattttcgtggaagccgtcggcgaggcgggtggcaaagcgcactgaacttaccgtgcccgtggtccacgccatcgtgatggatcttcaaaggtgagagtccgctggtttcgtgaagaaaatggcggacttttcgatatcacatccaccgagcgcggcccgtcccgatcatgacatcttgacgcagaacgagtgagaaaaaagcgacctgcggcgtccagggcgcttcagctctggggagttgcagctggtgcggaggcagcgccggttaacacgaaatcttcagacgggattgtatttgcccagtcgcgggacgaaatatgccgcggcacgatcgcggacggcgataggaagaattttcgccttccaggaaatcgcgcggcgctggctttttccggcgcagtctattcgctccgccgaagcgacctcaaataaacagggcgggtgtatcgggaagtggtgatgaggtcgccggcggctttcgagcttatcgcgtgatcggttgcgtgagccggataccctccgcccatgtcttctacaaggcgggaaacccgactagccattgattttccaatggttgttacccgaggggcaggcgatgccgtccaacgttgagcttccggtgatcgtctgatgcgtgctgatgaattgcctgcagccttgccccccatccaggacaggtcccacttgctgaatgacgccagcgctgccagttgaagggttcgcccaggccaaggggcgcaagccagcgtcggaacgtccaaccgtctcggcgatcaccgcttgatcagtttggcgcggggcttggggctgcgtcgtggaggccgtgacaagaggctcggtcgtcgagcaagcgctcaccaagaggagaaccggaaaactcaggcagcgccaaactctaagcatgcattttccatttcacatcacactgctggccaccatagtggcctagccattacctaacggttaccgacccgtaaatgtccgcgcgccaaaagaaaaacattcaaggatcgaaagtatgccctccgccggagagcaggtcgacatcatggtgaccagggtgagtgccaccgtggttccgacccctcgctaacattgccatgagagatcggcgccgtccacaaggtgatcgacggccaatcctccctggaaagcgtcttgcttgccgcgcgcaaagcctcgcgaaccttgatacctcgaaatccttcgacatggagccagtggcgggacgcggctaagccgcgggcggcgtcaagagcctctcggaaaaacccttttatcgcgttccactgaataccttgacgaggctatggattgcccttggccaccgcgcattcctcattgacgcgtggcgaagtcgacatcgtcccaccgacccgggacccgattttcagcgaccaaggtcgggttcccgaatggcctcgatcaagacgagggtacgctttcgtacggcgacctatcttcgtcttcggcgtttcctttataggaggatgtcattatgacccaagatcagcccaaacgccgaaggtcgttgagccaggcccagcgggtggaggcgcgcgacagaaccgatgaagtcgcacgggagacaatcgaggaagagcgtcgccgacgtgaagctaagacctggcaccttcaggcagcgcggatgcaagcgcaagagcgccaagatggcacggcgaccgagactggaaaccgcaccttgccgtgaggcctttcacggtttcgacgagacgaaacttgaagtccggcgggttcgcgctaaatcccccattgaattgtttccgacgatcttcacggaggtcaggaggtcgtcgttgaggcaggggcaaggtcgggcgcgagagatccgcccgaccttgccattttcgaaacaagcgcttccagaaagcctggagaatgtccgaagatctcaaaccatccttgatgacaccgcgggagatcaccgctgtcctagttagattcgggaaattgttggatgggttcgcgttgcaacttccgactgataagaatttgctcgccaagctggtcagggacgccgccgccgccatcaaggaacttgcgcacgacgtgggtagcggcgatccggatatcgcggtcgaaatcgtgaaatcggccgcgcgcttggtcgccgcgatacgcgagcaagttacgaaatctcccccaggcgtgactatccattgatggttgtccaagccatggatcggtccgggtcggtggcccccggtaacatcaaggggtcaatttccacctccgtctaacgaccgatcagatcgctgtcacgagtaccactcgcgaggtcgtgcagcgcctgcgtgtcctccggatcatattccgcggacatgataacggtcaaaaacgccgcccgtgcttatgtctttcttggaggcattggggtgcctttccttgaccgcttcaatcaacgcttttggcttcataccgggaaccgccaattttctgatcgtctcggccacaaactctgtttctcgaagcttcttctcgcgcatcctgtctccctaggttacggggtgata

SEQ ID NO: 39 - DNA, 45489 bp, Rhizobium matallidurans
  source 1..45489: mol_type = genomic DNA
ttagatcctcgggacgagcccgaggatgacgtcgaagtgtcggcgatcgccggtaacccattgaaatgccgtggcctaagtcgcctcggacatctcccaactctaccccttcaccgccaccacgaatatccgcggaaaccgcagcaagacccgtccgtcggacatcttcggataggccttctccacccgcgccaggtaatccgccagaaacgcctcgcggtgcgcctcgccggcatggtcgagatacgggcgaaggccggtgcccttgacccattcgacgatgtcagccgcgtccgccatcgggtggttgtaggcggtgtgccagatatcgacccgcttggccttgccgatcagccgggaataataactggagggtgcgggcaggggcgcgcggcgcacgcccttggcctcgaaggcggccttccaggggccggcatgggcggtctcttccatcaggagatgcgtcggctcggtgaggttgtcgggcatctgcacggcaagcgcgccaccgggcgtcaggccatccatcagccgctcgaagatatcgagatgattgggcagccactggaagacggcgttggcgaagagcagatcgaccggctgcctcggctgccaggtggaaagatcggcctcgacgaaatcggtgccgggcaaccgcttgcgcgccgcctgcagcatgttgagatcgctgtcgagcccgctgacgccggcggcgccgtagcggtcgatgatcagctcggtcgagttccccgggccgcagccgagatcgacggcgcgttcgatgcgctccatcggcacctgcgccagaagatcacgcgccgggcgtgtccgctcgtcctcgaatttcacatattggcttgccgaccatgccatgttggttctcgctcctctttcaatccgcgtcttcgatacgcttgatcctgatcttgtcgatgttgcggccatcgagcgataccacctcgaatgtcagttcctcgaagcggatcgtctcgcccttttgcggcagatgcccgagccgccacaggatgaagcccgccagtgtcgagaagcggtcggtctcgtcgaccagatcgacgtcgacaagcttggaggcatggcgaatatcgatccagccgtcgaccgtcagcgagccgtcctcgccgcgctcgatcgaaagcttctcctcgtcctcgtcgggaaactcgcccgcgatagcttcgagcaggtcggtgggcgtcaccatgccctcgagagcgccgtactcgtcgagcacgatggcgaccgcttcgctggaatggcgcagctgttccatcagcttcagcgcgctgatgctctcatgcaccacgaagggctcgcggatcgagcgctcgacattgatcgagccatcaacgatcaggtcgcgcaggagatcgcgggcgctggcgacgccgatgaaattgtcgaggctgccccgcgccaccgggaagcgcgaatggccgacgtcgacgatgcgccgctgcaactcgtcctgcggcgcgtcgaggtcgagccagtcgatatcgatgcgcggcgtcatgatcgacttggcggagcggtcggccagtgtcagcacgccgtggatcatgtccttctcctcgttggagaacaccgcctcctcggccacctgttcggcgatatggtcggcggtcgggccgagcgtcacctgcgatctcttgccgcccaaaaggccgagcacggcgtcggcggtgcgctcgcggatgttggtgggcgtgatcagccgttcgcgattgtgccgcgccagctggttcagcgattcgatgatgaccgagaagccgatcgcggcgtagagatagcccttgggcagatgcacgccgaagccttcgatgatcagcgagaagccgatcatcatcaggaagccgaggcagaggatgacgaccgtcgggtgcttgttgacgaaactcgtcagcggcttcgacaagagcagcatgacgccgatggcgatgacgacggcgatcatcatgaccggaaggtgctgcaccatgccgacggcggtgatcacgctgtcgagcgagaagatcgcgtcgagtacgacgatctgcacgatcacctgccagaagaccgcatgcaccaccttcttctcggaggtctcgacatggccctcgagccgctcgtgcagctccattgtgcccttgaagagcaggaacatgccgccgacgagcaggatgatgtcgcggccggagaagctgaactccatgaccgagaagagcggcgtcgtcagcgtcacgatccaggcgatcgaggcgagcagcgccaggcggatgatgagggctagcgccaggccgatcaggcgcgcgcgatcacgctggtgcggcggcagcttgtcggcgagaatggcgatgaagacgaggttgtcgatgccgagaacgatctcgagcacgataagggttgcgagacccacccaggcggaggggtcggacatccagtcgaaaaacatcaatgctgtaatgcggccacgtcgacgggaccgctccttctgcgatgaaaataggaaaggcggacggcgacggcgacagacggccggcgatcgatttccgcgatggacaagagaagagccgccctgaacgcggctatgtcaggcttggcgccgacgctgtaaacggtgcaccgtctacaaccatccccatcgtcgttcgcggatatgtcgcgggaagacggggcggaactggtactggaagggtcgctgtcgggcattcttcagttttgaaggctaacgtgaccaagcgcaagaggcctcgccggaaattatcgcccgaaacagtggagatgcatggccgccgacgatgcccatgcctatcttccccgggctctttttaagcgatttcaccgaattcctagcgatttgcgcaagggaaatttcatctatcggtagttacaaaacatggagaacatcgtgcgaggattgcaatgacccgacgttatcagccctctctgcggaaagcttccgcgatcgtgtcgttggtcggcaccgccctgggaggccttgccgatgccgcggcccaaacgacgacgccgccaacgatgccgcccagcgtgcttatcgaaagcattcgtgcttctcgcgaagcctacctcgcgcaggtcttctctgcgtttcgcacttatagcggcccggaccagatcctgacggccgaggatatcgaaaaggcgcgtaacattggggcggcggccgcgcgcgcaggcgtgatgaaggaattctttgccgccgacctcaacgacgacggccgtgtcaccctcgaggaaatggcggcggtcaatcggaaccggccgggagtgtcaccgttcgatgtcgtgggcgcccttgatgacggcgtcgtcaccctcgaggaggcgaatgcggctgcaaggatcggccctgcgcaggcacgggattacggcgtcggtgcgatactgatcggcctgcttgctctcgatctcgacaaggatgggaagctgacggccgacgaactggaaaagcaggcccgcgcggcctttgcctactacgatagagatggcgacggcgcgctgtcggcaaccgaaacgcgggcgctggcgaccgccaggaccgacagctttcgcgagcgcgcggccgaagaactgttggcgtcatgcagccttccgcgtgccggcgctgccgataccattctcaatgttcgcagttatgaggccggcgctctttccgatgtcaccgtcgccgggcaggacggcgtcaccgagaccagcgagctcaacatcgaggccggcgatacgccgctttacatcgtcgcatcctcctacacggcgatgatctggcgcgtgacgggtcatgtggggcgcgtcagccgcatcgtcgtgtcctctccggccggcgccggtgccgtcggcttgccgaaggagaaggtgacgtccatccgctcgcagggctgcctgcgctatcagtcggcagccgtcgcgtcgggaagccagcagttggccgcgctgggcaaggtactcggcaagccggtggacgcgatcatcgacgcctatacgttgccgaaggcggtgcttccgtcggatggcgtcgcgccgcgcgatctgaagccggggcgaaacgcggcgttgcgctcgaccgtcgcattttcggcgggaggcttggagaatgtcgatgccgatacatatcgctccttcatgcgctttagtccctccggcctgatcaggatcgatcccgccgacgtggtctccgatggcaaggcgcaacgctacgaagtcctgccgcaggaggcaggattgttgcaattgctgatgagcggatcactgcggacgcagcagccggggctctatacgatcgacaagccgatcgcccgcttccccgccggccttaacggtgcgcaccaggtcaggttcgttcttcctgaaggggttccgcgtccggccggcaatccgggacattcgacgcttatccggcccaatggctcggtattcacgcccgaggagctgcggcttcccgaggtcataagagactgacggcccgggcttgacccgcgccgtcgcggcctgatcaggccgccaggatgcgtgtgctgtcgctgttggcgacaacagtcagcaaatcgcgggtgcgcgcttccgcggcttcgaagaagtccgacatgtcgctgtcgatggtcgccgaaaaccgggcgacgtcggggccgcgattggagtagccatgcgcctgatcggcatcgatgcggacgatatcgccggccgtggcttcgaactcttccaggccctggtccgtcatccggcggatgatcagacagccttcgatgatgcgcaggatctcggggctggcgtggcgatgcagcggcgtgcggccgcccgcgggtacggttacgtcgaagacgttcagccatgttccctcgagccgcgtatgccgctcgagctggccttccggcacgaagccggcctgtgcgccatcgggcgcatgggtgttcacaaatgagttggacatgatgtctcgcttttctttttcttagcggcgagcgcgatagacctttagccggagaatggcaacccgctaaaatgcaaggctccgatgcacatatcggaacccacgcagtcagcgggttttcggcggcgtgatcaccgcatcgtgtttggccgttatttgttggccaggatgcgcttggcgacttcgtcgagcgccggcgcgttatccttgatgatcgacgcggcgattgcttggagctgcttgatattctttttctcggcgtcgtccagcgcatcgttctgtgcgttcgtcagttgttgatcgagccggaaatagctgagcgtcgccgcgttttccttggtgacgacggtggagaagttgagtttcgttccgggcgggttgagcagcttgttggcctggtaggatgctgtgcttgcctgtccctgcatgaggatcgagatcaggggtgtgtggttcgacacctgcatccagccgacgataccccattccttggcctcctgatagggaacgggtcggttctgctggccggtgccgagcgacaggaagacgagctcatcatcctgccacgcctgcttgcgcgcctcgacataggcggcaagaatgggatcgttggcgaagacaccgccatcgatgagggcgacgtgctgcgcctggcgatctgtctcaccgatccgttcgatcagcgccggcggaaaataggtgggcgcggccgaggtcgcccgcgccgcttcccagaaacggaacttgctgttctcggcgtcggcattcgacatgaagagagcagcccggctctcgatgtcgtaggccgtgatcaccactttcgacagaccctggtcgagcgtggctttgccgagcttctcttgcagcctgttttcgagcacgtcgggcttatagcgcggatcgtttatcccgaacggattgaacaccgcggccccggttggcttcttgaagatctcggcgccgtaatcgacgtaaagcttgagaagatcggccggcgtgcacgccgctttcttcgcatcatccggatgcgggcaggtcagcccggcggcgatgatgccgccggtcgatgtgccgacgatcatgtcgaacgccttgtgaagcggcagcccgtccagccgcgcggcgaggttcaccaggatggccgccgggatgatcccgcgaatgccgccgccgtcgatcgaaagaataaaacgctttgccatgctcccctccatgccggttcatccggttgaggggagtatggtgtttaaaccaaggattgcaacaaactgaaaagcgcgccctggttgaagccggttgcgcgcgcctagaagctggtgatcacgctgatccctgttgtctccgccctgtcgagcgtcatcagcgccgggatcgcctcggcaagcccgatcctgcgcgaaatcagtttctgcggcgcgatcttgccggcggcaagcatcgacagcatcgcgtcgtagcgccaggcctgcatgccgtggctgccgtagatctccagctcatggccgatcacctgcgccatcgggatcgcgggtgtcgaatgctcgcccagcatcagccccacctgcacatgccgcccccggcggcgcaggttcctgatcgaattgaagcaggtgacgggatgaccgagcgcgtcgatcgagacatgcgcgccacccttggtgatctcgcggaccgcctcgggcacatcggcgaccgctgtcgcgttgatcgtcgccaccgctccgcattcccgcgcgaaggccagtttctcgtccgacacgtcgatggcgatcgcattcgctcccagcgcggtggcgatcatgatcgccgaaagcccgacgccgccgcagccatgcacggcgatccattcgccgggtcccgtgcgggcctggtcggccacggcgcgaaacgaggtcgcgaagcggcagccgaggctggcggccgtcgcgtcgtcgacgttttctggcaggtgcacgagattggtgtcggcgtaatcgatcgcgacatattcggcgaacgagccccaatgggtgaagcccggctggaactggtccgggcagacctgttggttgccggaatggcactcgccgcagcggccgcagccggaaacgaagggcaccgtcacccggtcgcccaccttgtagcgcatcacgcccttgcctgtcgccaccaccttgccggcaagctcgtggcccggcacgtgcggcagcttgatgtcgggatcatgccccatccagccatgccagtcgctgcggcaaagcccggttgcgccgacggcgatcaccacgccgtcttcggtgggcgtcggatcgggcagggtggcgatctcgggagccttttcgaaggcgtcgtagaacatggctttcattggtctcgctcctgctggtcgcgccccggtcccgggcgtcgtctttgccgtataatggcacgcggtcgcgatcgcctccaaccgttccacccatgattttcgctgatgtatcgatcgcgcgcgctgcatcggtcgcgcatgaatattgccgttgggacggcggccacatcccgtttcttgcttagccccttgcgtggcatatttccgcttgacccggcccgcgcgcgggcttttctctccctgcatcgtcttcaaggagaaacgcatggccgtcgatacatcgccccgttcgagcacctggacctatgtcgagggagagtggctgaccggcaacccgccactgatcgggccgacctcgcatgctatgtggctggcctccaccgtcttcgacggcgcccgctggttcgatggcatcgcgccggatctcgacctgcattgccagcgcatcaaccgctctgccgtcaacatgggcctgaagccgacgaagacatcggaagagatcgaggcgctcgcctgggaaggcatcggcaagttcgacggcaagacgccgatctacatcaagccgatgtactggggcgagcatggttcgcccttcagcgtcgtcgccgtcgatggcgacagcacgcgcttcgcgctctgcctgttcgaagccccgctcggcaacggcaagacgaactcgctcaccgtttcgcccttccgccgcccgtcgccggagaccgcgatgacggacgccaaggccggttcgctttatcccaacagcggccgcgccatcgccgaagcgaaaggccgaggcttcgacaacgccctgatgcgcgacatgaacggcaacgtcgccgagaccgcatcctccaacgtgtttctcgtcaaggacggcatcgtcaagacgcctgtcgccaaccgcaccttcctcgccggcatcacccgcgcccgcgtcatcggccttttgcgccaggccggcttcgaggttcgcgaggagacgctctcggtcgacgatttcatggcggccgacgagatcttcacctcgggcaactactccaaggtcgtcggtgtcaaccgcctcgacagccgcgaactgcacgaaggcccggtgacccgcaaggcgctggaactctacatgaattgggccttcggtcgcagcacgggcgacagctgagtttggatcgaggcggagaatgcggatcgccgcggcgtcaccgattctcctctcgcccaggagagagggtgcccgtggttccctgcgttcaacgctccgccgcggccgccctcggccgcaccatccacgaataagccgccccggcgatgagcagcacgcaggtgcccagaaacaccgcccgcatgccgacatgcccgccgatgaagccgccgaggatcgggccggcgacctggccgacatattgcgacgacaccgaccatccgagaatgctgccggccgcgctgtcgggaacgctgtggcggatgacggcggagatgcagggaagcagcccgccgagcgccacgcccatcaggaagcggagcacgatcagctgccatgacgaggtgacgaaggcctgcgggatcaggagtaggccggcgatgccgagcgcgccagctatcacgggccagtggccgatcctgtccgccagcttgcccagccgcgaggccgaaaggatgctgccgagggcagccgccgacatgacgatgccggcgacgatggtcacccgcgccgggtcctcgaccagctgcgcgacatagacggtgatgatcggctcgatcgacatgttggcgagcatcagcagcatgccggtgaagagcatggcgatgacgggtcccttgtccggtatcgaagcccagccgccgctttctttggcggcctgcttgcgggcaggggacttctcctccttgatcaggaagagcgtggcgagaaaggcgaggaagatcatcgcgccggccgcgagaaacgtgcctcgaatgccgatcaacgccggtagcacgccgccgatcagcggcccgaccagattgcccgccatgatcccggatgcgagcgtgcccagcgcccaggccgagcggtccttcggcgtctgcgtcgccaccagcaccatcgagccggacgaatagccgcccgccagtccgacgaagagcctcagtgccaccagctgccagacgtttccggccatgcccatcagcgagatcgccaccgtcattccgaggctcgcgcgcaccagcatcagcttgcgcccgtagatgtcgccgagccgcccccagagcggcgcgacgaaggcggcggcgaagaaggtggcgccataggcgatccccgaccactgcacgatcgccgcggggtcgttgacgccgagttcctcgacatagagcggcaggaaggggagaagcagcgtcatcgccacgatcgtcgtgaacgagccgacaagcgaaacggccagattgcgcttccagtagatcgaacctggcgcggccgcgccggcatcctcggtcttgtcgctcatgtcatggccttcttcatcatcgaacctccccataggaacgaaaggcggcgctgaagtcgatcaagaccgctcaggcccgggcgaaagccggggcggggaggtgaggagggacaggagggcgttccgtttccggtggcgaaccattgatatagtcccgccgtcgatgggccatcaaggacggatagggggccattcggttcgctcgacgtcggattccgcctcgcggagctggccttttgccggacgggcggcagtttccataagaggaggctaaacaccatgaccgacgaaaacgacgcccggcgggccggaacggtccgcgccctctacgccgcctatatcgacggccgcaaggatatcgtcgccgccatgctgacggaggatttcaccttctccagcccgcgcgacgaccatatcgaccgcgacgcctatttcgacaggtgctggccgacaccgccgcccttcgaacacatggagatcgagtatctcggccttgccgatgacgaggcggtggtgcgctatcgcgcggtcaagcgtgagggcggagcgttccgcaacatcgagacgctccgcttcaggggcgacaggcttgccgccgtcgaggtctattttggccgcgaggcctgaggcttcaggcgcccgactaggccgccacgcgccgcgcctgtccgcgcgacaccaggaaggcctgcgccaggcttcccgccgaaaacagcaccacccagatcaggagcgccgtttgcaccggcggcgaatccgggccgttgccgatcgggttggagggtggcagccgcgacagggtttcgttgatcccgggcacccagagcaggaaataggtgaaggagaagccgaggttcctgagatacgggatcagccgcccgagaaagccgagcttcggcagcacgagacagatggcggaaacgacaagcacgatgatggcaagcgcatggccggggttgaagccgccggtggacgagagcccgaaggcgctgatcgcggaaagcgccagcgtcgccagatagaccttgccgaccgatgtttccgggcggatggagcgatatttggcgaagctgtagagcccggcgatggccgggacgatgctgatggcggtgtggatctcgccgagaagcgaaagcggattggccatgtctgtttccttttgtgaaccgactagtcggtcggtttttggggcaaagaaatgcgcatgcacgtctgttggaaaggcgatctaaccggtcagcctccggagcgcgggccgggtgatgcttgcgtagacttccgcgtcgccgcccgcgacccgtgccgccagcatggcgccgtgcacggtggcgacgagaatgcgggcgccgagctgggcgtcctcggcgctcgccaactcgcctttgctctgcccctcgtcgatgaagccggcgagcctcgcggtcaactcgtcgaaatgcgccttcacctgcgcggcgacctccggcggcaggctcggcagctcggcggccagaagggccgcgatgcagaagggtgcgctattgtctcggatgcattgttcccagaagccgacatagccggcaagccgccggtcggcgcgcggctcatgcgccgccatcgccgccattccatcctccgtcgcttgccggtaacgggcgatcaccgcgacaacgaggtcggccttgccgggaaagtggtgatggatcgtcgccttgccgacgccgaccaccgcggagatatccgcatagctgaaggcgttgtagccgcggctgacgatcagcgactgcgcgctgtcgagaatgcgtgtgtatgtatccgatgccatgagccgatatctaccgactagttggtcggtcgtcaacggggtgcacgcaaacgtgagcgtcgcgacgggcgggggcgtcgcggactgcgggaggggtgcctcggtgctgcggtctgaaacaggcgctgcccgtgcgttgaggttctggtcatggccccgccggtggacctctatcggcgaacaatcggcgggccgcctgccaagatggcgccggccggccgaagccgtgaacatcggctttgtccgaaagcggcccggcacctcatgcaccgggccgccgcgatcatgtcactccgcgggtggaatgcgcacgatctcgccattgtccgaaccaccacccgtccttgcctgcagcagcgacgcttcggaaatgtcgatcagcggcgaataggtggcggccggcatccgcacctcgcccgctctgtcgtctctcgtctcgagggtgatcgcggcgccgcgttcgccgcgcgcggcttccagctggccgttcatgatggcgcgttcggcgcgcagctgccggatttccgacttggcgatctccaggctggtgcgcagctggctgatttcgtgacggtctgaatccagccgcgtatccatgtcgcggcgcagtgcatcggcatcccggtcgcggcggatccgcaggctgtcgctttcccggagcttcatcgtcagctcgttgttctcggtggcgagctcgcgccgcgccgtctcgctctcggtgcccgtggcgcgggcccgctgcagctcctcgtccagccgctcggcccgcgaaagggcggtcaccagctccgatttcacgcgcttggtctcgttgcgcgccgcctgcagctcctcgtcggtcatccggttgcggccattcgccgtcaccagcagcttttccatcagctcggccttggagccgatggcgtcatggcgcgtggtcagatgcgcgatctccagtgccgaggaggattgcagcgtctcgaactcgacctcgagccgcttgtggcgttcctcgatcagcagcagctcctgcttcatccccgccgacgcggtctgcaggttgcgcaccagcgcctcctgttccgtcaggccgcgcttcaggtggccgcgctcctcggtcagccgcgccatctcgcggctgtggacgccgttgtcgcgccgcgaggtctcgatcagaagctcatgcgcggtcgtctcgctgtcgaggcgcgccttggtcgccgccagctcgcggccgcgctgatccacatcctgctgcgcccgcttcagcagggtcgatgcctcgtcgaactggatcgtccggtcgttcagttcgcgttcggcatcgagcagccgtgtctcgacgatggtgaattcctcgagcgcgatctcgtgcagcccctgcagcgtggtcagttcctcgcgcagcgccgcactttcggtgcgcaattgcccgttgtcggcgcgaaacgtcttgttctcgccggcaagccgcacgttttcctggtcggccttctcgcgggcgctgctttcatagtcgagcagcgaggcgatgcgcgcgcattcggcgcgaagcgagccggtctcgttcagcgattggctatgcgtgccgatcagcgtcgccacgcggtcctgcagcgcggtcaggctggacagcaggtcgtcggaactgcgctggttttcctcgatcgccgagccgaaggccgacagatcctgtatgtcgggcatcgcatagccgggccgctccaccgtgcccggtctgctgtcggcgatcgacgcctgttgctgccccgaagccggcaccaccctgccgtcttccccgcgacgaaaaaagctcatgaccatatctcgtgtccccaaacaccacaccacgggcgcatccgaaatatgcctctcgactaatcaagcgatctctatcgaagattgcgaatagctcataaaaacgatgccctgagttgcatcgtgaaagggctatatgtttttgtcaaaagacggatgatgacaatcaacagtcttgttgcggccggcaattgtttgcccgggatcatgtgggatttgcgcaacaggcggcagggtatcattcgtcgggccgataccgtccgcccggtcactgctcagaccggcaacggcgatcaatcctcgtaaagcttcgatttcttcgcccagtcgcgccaggggtgcagctcgaaatgcggcatgtcccagccgtctcggatgtcgccgttcatgtcccagtcgccaccccagcgcagcttcagcggcttgccgtccagccctttcagcttgagcttcttgggtagcgccaggatcacctcggagaggcggatgaaggcgtccttgttgttccagtcataaggggccggaaacaagtcgaaggcgatcgccggaacgtaattgtgggctgaatcgccgaaatgcaccttcgagaagccgccattgaaggctcgctcctgcgcatcgcgcccgcgggttgaatcgagcaccttgaaatcgatttcgaggatcgccgcctgggcgatggcttgcagatgcggatggcatttcgaaagggcggcaagcgatgcgctgctgaaatgaaacatgacatcctcccatgccgcgccaagatgggccggcccgggaaggctatcgaaagaagggttgtgcgtacacaaatcgcctgcaatcaatgattgcaatcgacggggccgcgcgggctgagcacgacggcgtacgcgggggctcactcgtccggcaagatccccatccgttcggtctcaagctccgtgccgagttcgaccgccttggtcttcttgtcgtagatgcagaaatagctgacgaagccgttggcgcctttcggcttgcccgtcaccagcgccatgccgaaattctcgctgccgaagggatcgaccacggcatgcggcagttcgacctgcgcgcgcgccgccatttcgcattttccctgcacctcggctgcgaaatccttccaggcatcgcccgaggaggcagaggcggtgccggccgcgacggtgatggccgcgccgccgatcaggtggagcacggggttccctgtcatgcccagccctatgccaagcctcatgccaagccctcgcatgcttttcagtcctcgcggcgaagcgctagaggcgctgtctcgaagcagtgtcacaagcaccgtcatcatgatcgatttgccccttgcgtgccaagcccttagcgcgggcaaattttccgccgtacctgtgttttttgacatttcgcaggttgcctcaccaagcttgcgctcctatgttcccgcacacctgccgattacgcaaactattgccaaaaggagacgaccatggcttttgaattgcctgaacttccctacgactacgaagcgctgcagcccttcatgtcgaaggaaaccctggagttccaccacgacaagcaccacaaggcttatgtcgacaacggcaacaagctcgcggcggaagccggtctcgccgacctctcgctcgaagaagtcgtcaagaagtccttcggcaccaatgccggtctcttcaacaacgctgcccagcactacaaccacgtccatttctggaagtggatgaagaagggcggcggcggcaacaagctgccttccaagctcgaagcggccatcaattccgatctcggcggctatgacaagttcaaggccgatttcgtcgccgccggcaccacccagttcggctccggctgggcctgggtttccgtcaagaacggcaagctcgaaatctccaagaccccgaacggcgaaaacccgctcgtccacggcgccaccccgatcctcggcgtcgacgtctgggaacactcctattacatcgactaccgcaacgcccgtccgaagtacctcgaagccttcgtcgacagcctgatcaactgggattacgtcctggaacgctacgaagccgcaaccaagtaagcggttttctagagactgacgagaacacccggtggagacgccgggtgtttttgtttgtgtcacatccctgtcacccaccccgcctaatccgacgcccatgacccatcctctccccctgttccgcttcggcatcgtcgccgatccgcaatacgccgcgcgcaagccgcatgccggcatggatcgctattatgaaaacagccccgccaagctcaaagccgcgatcgaggtcttcaacgccgaggatctgagcttcgtcatcacgctgggcgacctcatcgaccgcgatttcgcaagcttcgacgccatcctcgatgcctatgacgccctgaagcacgacaatctcttcctgctcggcaaccacgatttcgccgtcgcgcccgaacatctggaaagcgtcgcggcccgcctcggcatgccggcgccctattacagcctcgccaagcatggctggcgcttcatcgtgctcgatggcaacgaagtcagcaccttcgcgccgccggtcggccatccctatcgcgagatcgccgccgaaaagctcgccgaactgaaggccgccggcgccatcaatgccgaagcctggaacgccatgatcagcgaccgccagttcgactggctgaaaaccgaaatcgccgacgccgctgaaggcggcgagcgcgtcatcgtcatgaaccattacccggtctatccgcccaaccagcacgactgctgggaccgcgagcgcatcatcgcgctgctggccgaaagccccaacgtcatggcctacttcaacggccacaaccatgtcggcaattacggtgtggtcgacggctgccacttcgtcaatttcaagggcatggtcgataccgagagcgaaaacaccttcgccattgtcgacctctacggcgaccgtatcgaaatccgcggcttcggacgcgaggagagcagggtgctggcgctccggtcctgagcgccaaacaatcctcgccgtccatgaaaagcgaggaaaagtgcaaattcctgaaatgattgccgtctcacccacttgttactttttagccgagattaatttgccatcatgccggggtaagaacgaggcgccgggcttcgaaaatctcggtattgaagaggagtagcgatatgagaatgaaatcaatcgtcgcggctgtgctggtcgccggcatgggggtcacgaccgtgtttgcggccgacggtacgcatgacgcacgcgttgccatgatgaagaagatcggcggcgccacgggtgcgctggcgggggtggccaagggtgagaagccctacgacgccgaagccgtgaaggcggcgctcgccaccatttccgaaaccgccaaggcgtttccggatcagttcaaggccggcacggaaaacgcgtccgccgattctgaagcaagcccgaagatctgggagaacatggacgacttcaaggctcgcgcggcaaagctcggttccgatgccgacatgctgctcgcccagctgcccgccgatgccgccggcgtcggcgccggcctgaagacgctcggcgcaagttgcagcggctgtcaccagaactatcgggtcaagaaggaatagtcccgctcctcttttgaacaggcgatccgccgtggccttgccgacgcggcggatcgctttatgtccagagagccggaaaggcgatgggagagcggtgcatggttcgtcggttcgtcaggtttgtcctctgtcttgtcggcgtcgccgtgctgggtggcgccgtcttctacctggtgaccgcgcccaacccgatgcccgaaagcagttgggccaacctcggcgcgcccgatgccaagaacggcgagatggtcttctgggccggcggctgtgtcagctgtcatgccgcgccgggttccgaaggcgatgccaggctgacgctctcgggcgggctggcgctgaagagccccttcggcaccttctacccccccaacatctcgccggacgagcaggcgggcatcggcaactggacgctggctgagttcggcaatgccatgaagcgcggcgtggcgcccaatggcgcgcacctctatccgtcattcccctatgcctcctacagccgcatgagcgacaaggacgtcaacgacctctacgcctacatgaagaccctgccgaagagcggcaacgtcgcgccgccgcatgatctgccctttccgttcaacgtccggctggcgctcggcggctggaagttcctctatttcaacgacagcgcgcgcgtcgtgcttgccaatgccgacgagaaggtcaagcgcggccagtatctggtcgagggtcccggccattgcggcgaatgtcacaccccgcgcgatgcgctgggcggcctgaagccggacatgtggctggccggcgcccccaatccggagggcaagggcaccattcccaacatcacgccgggctcgaaatctatcggcggatggagcgagggggatatcgccaattacctggaaaccggcttcacgcccgatttcgattcggtcggcggatcgatgaccgaggtccagcagaacctcgcgcatctacccaaggctgatctggaggcgattgccgcctacctgaaggcggtgccgtcgcgttaggaatgtctcagtggtagaaataccccaaaatcgccgcattgcagcatttattagcatattcgactgaatgccccgcagcggccacgccgccgccgaatgacgatcctcaaacgtcttgcgaaaggccagctgaaatgcacagcccatcagtatctcccgcccgtgatgtcgccaacgcctccgccgacgatctcgaagcggtcgcgcgcaagggcggcaagctcaagcgcatggcggtccgcatccccacctacatggccgatatccgcgagaacccggcctggctgccgatgttcctgctcgcccgcaccatcgcggggcgtcgcgcccactggctgacggcaagaaagagcaacggcgcgatcgacaacctgccgacgatctttacaggcgtggacgccgaaaccgccgtcgatgcattgaagcgcgacggcatcttcccggacctgcaattgccgccggatatcaccgaggagatatccgccttcgggcaccagaccccatgtttcggcaatttcgaccggaagatagaattcgcggcatcggaccaccgcgccaccgaggacaggctcggtcgcccgatcctatccggccaccatttcgaacgggcgctggagtgcccggcggtgcgcaccgtccagcgcgacccgctcctgtcggagatcgcccgccgctatctcggcgcccaggcgcggctgatcacgacgcgcacatggtggagcttcccgaccaaggccagcgaagccgaccgcagccttgcctcgctcgacaagtatcatttcgatctcgacgactggcggatgctgaagttcttcttctatctcgtggatgtcgacaagggcaccggcccgcacgtcttcgtccgtggcagccacaacaagcgccgcatgaagcatcagttgacattgctggtcggccacccggccgacgagatcatcgattattacggcaaggacagcccggtgacgctgaccggcaaggccggctcgggtttcgtggaagaccctttcggcttccacatgggaaccgtcgccaccgaaaagccgcgcctgatgatggagatcggcttcggcgtctccaaaccctcccgccgccgcttccatggcgaaccggtgctgcgctagcgagcgcagccgccgagcggttaggggcgcaataaagcggtgactgccgcctaagccagcgcctgcagatagcgcatgccggtgaccgggcgcggaatgaagtccatgtgttcgtagaagcggtgcgcctgtatgttgcccgtcgcggcgctgaccgagaggtagccgcagccggcattgcgggcggtgtcgcgggcgcggttgacgagatgctggccgacgccgtggccgcgatggccgtcgcgcacgaagagatggtgcaggtccatgccgcgcgcgccttcctgggcgcgatagagcggcaccagaatggcgtagccgatcagcccctcgtcggtctcggcgacaagcgccgtgatccagggcagggggccgaaaaggtcgcgctcgagctgctccggcgtcgagccggcggcgtcgccgtggtgcctggccagcagcgcgatcatgtcgttgagttcgggcaggtcgcgcggcttggccgtgcggatattgatcacgggcgggcggatcaatgagatttcgctgtcttcgatgtcggtcatgtcttgcgtcccggtctggcgtttcgtggtaatctgccgtcaggacgcttgagatacaacaaagccgcctgacggcggcttgttgacaataagatctgtccagccgccctttacaggtacagccaaaaataagagcggttgatgtgcgcgttcttgatcatggcgcaatacatcttcccaaattctcgtcttgtcaagcgccccgtccgcgttgccatttgtttcgatcgcggcgcacggcggtcatgcctcgtttttcgcgcgcgccccgccgtccattatggaccttgtgtcgcttgtcgcgctaaagctgatcccggccgaagacgcatgcgggccacattcccgctttagctctgtcttcaccgattctggcagaggtcctttcatgcatcgtttttcgatccgccgccgagcgcttctcggctccgcattgctcgccccggcgctattcctgccggctgtcgcccgcgccgaggagggcggggacgagatcgaccgccgcatcggtgcgctggaaaagaagatcggcgggcgcatcggcgtttccgtcatcgataccgagaccaacgtctccttcggctatcgcgaaaccgagaccttcgcgatgttcagcacattcaaggtgctcgccgccgccatggtgctgtcgcgcgtcgacaagggcgaggaaaatctcgaacgccgcgtcgtctacgacaaggagcagctcatcacctactcgcccgagaccgagaagcatgtcggcggcgagggcatgagcgtcggtgatctctgcaaggcggcgatcacgctcagcgacaacaccgccgccaatctcctgctcgaaagcctcggcggcccgaaggagctgaccaactggctgcgcacgctgggcgacggttcgaccaggctcgaccgcatcgagcccgatctcaacgacgtcgccaagggcgatccgcgcgacacgaccacgccagatgccatgctcgacacgctcggcaacgtcgcgctcggctcggtgctctcggagccctcgcagaaaaccctgatcgaatggatggttgccaacaccacgggcaacgaacgcttgcgcaccggcctgcccgaggactggaagatcggcgacaagaccggcaccggcaagaacggctcggccgcagacatcgccatctgctggcccccacgccgcggccccatcctgatcgtcgtctacatcaccgacgcaacggtcccgaccgccgagatcaatcccgtcttcggcgaggtggggcgtatcgtggcggagatggtgtgaggcggcgggcggcttgctgaagggatatcccgagattatattggagtatatggagggatatccatgccgctttacatcaagaacgacgacatcgacaagcttgcggaaaagcttgctgcgtcccgtaagcaaagcaagaccgaagtggtaaggcaagctctcctgcgcgagatcgaacgcgaggaggccggggtgtcactcgtggagcgcggactggcctatggtcgggcactgagggcacgtgccggtgcggatcgaggtccgcctgccgacaaggcattcatcgacagcctatacgaggagtagccgatgttcgtggacgcatcggcgctcacggcaattctcgtcgaggaaggtgacgcccatgacttgcttgtgcgactgaacaggcacccgcatcgcgtgacctcgccgatggcgatatgggaaacggtcatcgccgttgcgcgcgaacttaaactgcctgtccatgctgctcacgaggctgtcgaaggcttcgttaccctcgcggcgatcacggtcgtatcgatacctgccgaaactcgctttttggcaattcaggcatttgagcgttacggaaaatcgcgccatccggcagcactgaattttggcgactgctttgcctatgcttgtgcgaaagggaacgggatgcccttgctctacaagggaaatgactttgcgttgacggacgtggaatccgcctgacttccggaaatggtaagatatttcataaggatagggcaagaacatgaatcttgctcacatcgcgttgaatcgatctcttaaccctgggcaccaaggctgaccatcaatcgaagcggccccatcctctccctcattctcgcccttgtggcgggaatccagccgacgcgcgtccgcgcggcgaggggattcttcttcggcccaatggtgggagcaggtcattcacggcgcagacgcgccgtggctggattcctgtcacaaggacaggaatgagggcagagtctgtgacccgccgcgccttcacgccgcggcaatatcctcggccgcactcttgtccttgctgtcatcgccggtcagctggcgcctgacctcttcggcgacctgcttctcgaacgccatgcggtcgtccgtcgacatcgccgccacgtcgccttcggtcaggcccatgctgtcgagcatctgctggcggatgcgttcggcgagcgacatgtcggcgaggtcgcggaattccttgatgacggcgtcgcggcgggctttgccgggttcttcggtgcccgacatcgtctggctctcgtcggtcgcctgcagcgcccacatggtgttcgatatggatggcggcgtcgtgctgggcgcgagcgatgcgccgccctgacgaacgacgtcgtcgatcacaagtggctgttgcttgttgcgctggccggattgctggaacaggccgccgatgccataggcgctggaaatgctatcgccgatcttcatggaaattcctcctgagacaatgcacgggagaattgcagcgaaagcctgcgccagcctttcgctgtcataatcgtcatagtacgcgatcgaccctcggatgccgtcgcgccggaacgcaagattgccagcaggctaccatcttcatggcccttctaaccgcttcacggcagcgtgtatccgatcacgtaatcacccggcttggtgccgatcgacccatgcccgccggccaccatcaccacatactgcttgttgtccgacgtcgtgtaggtcatcggcgtcgattggccgccggctggcaggcgggcttgccacagctccttgccgtcggtcacgtcataggcgcgcaggtagttgtcgacggcggccccgaggaaggcgacgcctcccctggtgataacaggtccgccgatgccgggaacgccgaccttgaagggcagcggcagcggggtcatgtcgcggaccgtgccgttcttcagcttgtaggcggtcttgccggttacgaggtctacgccggcgacatagccccagggcggcgcctggcagggaatgccgagcggcccgaggaacgggcccatgaacacgccgtagggcgcgccgtcattgcggttcaggccctgttcgctgcccttttcgtcctgtcccttcggcgggatgtcggcggcgggaaccaggcgcgaggtgaaggcgagataggtcggcatgccgaacatgatctgccgttccggatcgaccgcgaccgagccccagttgaaggtgccgaaattgcccggatagatgatcgatccctcgagcgatggcggcgtatagcgcccctcgtatttgtagcggtggaactggatgcggcatgcgagctgatcgaacagcgacacgccccacatgttcttttcttgaagcggcggcggcgagaaggtgaggtcggagatcggctgcgtcggcgcggcacggtcctcggggatcgtgccctgcggcgccgggatttccttgaacggaatgatcgcctcgccggtgcgccggtcgagcacgtagatgtcgccttgcttggtgggcgccaccagcgccggaacgaccgtgccatcggccttcttcatgtcgaagagaaccggttgcgcgggaacgtccatgtcccacaggtcgtggtgcacgaactgctggacccatttcagctggccggtcttcatgtcgagcgccaccaccgacgacgagaatttctcgacattggcgcttcttcccatccccagctggtcgggcacctggttgccgagcggcacgtagatcagcccgaggccctcgtcggctgacagaaccgaccagctgtttggtgaattcgtcgtgtaggtctggccctcgggcagtggcgtcgtcacgtcggggttgcctgaatcccagttccacaccagttcgccggtgcggatgtcgaaggcgcgaatgacgccggattgttccttggtggagtagttgtcgttgaccgcgccgccgatgatcagcttgccgtcgatcgccaccggcggcgaggtcgagtagtagtatcccgacggattgtacttcatgcccttttcgaggcgcagcgtgccctggtcggcgaaatccgtgcagaccttgccgtcgagcgcgtcgagcgcgatcagccgggcatccgaggtcggcaggtagacgcggtcgacgcatggcgcgccgccggccgccgccgtatcgtgatagtaggtgacgccgcggcatgtctggtgctgccggtctgggttcatgccggaattggcgtcgaacttccacttctccttgccggtcttggcgtcgagcgcgatcgcccagttatgcggcgtgcacagatagagcgtgtcgccgaccttgagcggcgtgacttggtaggtcgtctcgccgacgtcatccggtcgcttcacgtcgccggtctggtagcgccagacctccttcagttccttgacgttgctgacattgacctgatccagcggcgaatagcgctggccgaagggtgtgcggccatactggtgccactcgccgtcggtcaccgtgccgccgaatgtcggggtgccggtcatggccgtcggcaggctgccgttctggtcatgcgggttcgtcgtcatcgaatagccggcgaccgcgatcgcggcgagaacaggaatggcgagcggccatgggctggcagggtagggcgtgccggtcgtgccggaaaagccgagcggccggcggatccacggcgtcagcagccacaggccgagaaggatgatcaggccgccgcgcggcccgagttgccaccagtcgaagccgacctcgtagatcgcccagacgagcgcggcgatcacaagcaccgcatagacccagagcgccgccgccttgcgcttcagaagcagcgccgccgtcagcaggaacatgataccggcgaagagatagaaaaagttgccgccgagcagcacgagccagagcccgccgccgccgagtgccagtccgatcagaacgaaaaggagggatgtcaagacgatcgccatgaggccggtctccaactgaaatgcaccgagctcccgtggggatggggagcgatcaggaatgcacgcaaacggcgacaaaatcgtcttggccgaaagcatcatcagcggaaatagagcggcccgatctgcctttcaaccgccacaatctcgagcgcggccgcggtctcgccagcggtaaacatttaaagacagctcacctggccaacggccatgtaggcagcgaggctgcaaccgttccagccgagcgtgaaaataaccgcgtgtcgggctgcacggaaatatcctttgctgcggattggtttaatgacgaccgagaggagaaggacaaaagcgccaaatgcgccaatggccatcatcaccatacccaacggcgggaagtaaatcggaatgatttgccaacagcttgcgaatttatagggccccgcctttgcgtaggccgcgcccatcaaaatcacccagatgagggcgtgtattatcaatagaccgtatcgtccgatcccacccataaatacactccgccgttctgtgatactggcctcaggagctctgcttatgagtgcttttattttgcgacacaactcacgttccgcaaaatgtctgcagaacctgctcctcgggcttcggcggctccatataggcggcgaattgcgcgcgctcctcatagggtttggcgagcacgtcgagcagcgcttcgaacagcgagaaatccgcatcctcgacagcggcaacgatcgcctgctcgatgcggtgattgcgcgggatgacggcggggttgacgccaagcatggcgacgccgcgttcggtgccggtggtcgtctcgcgcgcaagtcgctcgcgccagcgcaccagccattctttcgccgccgtgccgtcgctgaacgtcttgaggaacgcgtgttcggcgccgtcgtcgacggccagatgcgccaggcgccggaaggtcagcgtgaaatcggcctggccggcctgcatggtggaaagcagcgactggatcagcgagagatcgtcgtcttccacatcagcaagaccgatcttctcgcgcatcccccgcatccagtgcagctggaagcgctcgccataatccttgatgaccacattggcgatctccaccgccttctcctgatcggcgtcgatcagcggcagcagcgtttcgccgagccgcgccaggttccattggccgatgccgggctggcttgcataggcgtagcggccgttctggtcgatcgaggagaacaccgtgccgggatcgtaggcgtccatgaaggcgcaggggccgaagtcgatggtttcgcccgaaacggtcatgttgtcggtgttcatgacgccatggatgaagccgacatgcagccacctggcgatcagcgccgcctgccgttcggcgatagcctcgaacagcgcgatgtagggattggcgccgtccttcagctccggataatgccggtcgatgacataatcggcgagcgcccgcacgccttcggtatcgccgcgcgccgcgaagaactggaaggtgccgacccggatatggctcgccgccacgcgggtgaagacggcgcccggcaggatctgttcgcgatagaccggctggcccgtggagacggcggccagcgcccgcgtcgccggcacgccgagcgcatgcatggcttcgctgacgacatactcgcgcagcaccggcccgagcgccgcgcgcccgtcgccccgccgcgaaaacggtgtggccccggcacccttcagctggatgtcgcggcgctttccgtgtttgtcgatcacctcgccaagcaggatcgcccgcccgtcgcccagttgcggcacgaagctgccgaactgatgcccggcataggccatggccagcggatcggcgccctcaggcacgagattgccggaaaagatcgcggcgccatcgcgcttcagagcctcgacgtcgagcccgagttcttcggccagcggttcgttgagcttgatcagccacggttcggcggccgaggacggcgcctgccgcgcgaagaagttccgcggcaaccgcgcatagctgttgtcgaagggaaaggggcgggacgtgggtgcatccgaaagaatggtcataggcattaggtagggctcggccacgcccggcgcaagcgcccaagtgccttgcgcgcgccaggcgttatcgattgcgaccaccgccgcccttgccgccgccgcccttgccgccaccaccgccacccttgctgccgtcacgggaagacgcttgcgcgctggtgccggtgtcgtcggggaattcgaccggcgacgtggacttgacgatcgtgttggcgcgatagggaacgatgttcgccgcctgcagctcgccctcggcctttttgcagtcgtagcgcgtgctgccgccgttgcggatcaggacctggctgcccttgcttcgcacgaacaccatgtcgtggccgacaagccgcgaactcctcttgcccagcctctcgcttttcatctgatagaaggtgccgttgacgctgagcaccgatgtctcccaggagacgtcgaccgacgggctgccaccgcatttctggtaggcttgcgcgctgcccgagataagaacggcggttgccgtgatgagatatagacgcatgtgcccccgctctcgttttcgccggcggccctggcgcgtcggcgctcctcgatgcgagcttgagcgccttggcggcgaaggcaattcggacataggaggtaggccgcgccccgattgctgcgggctggccggggtggtaggataaaatcgtacctccagacgccaggacgcgggagacgaacatggaaaagctcagcatcaccctgccggctgaaatggtcgatgtgatcaatgccgagatcgacgccggcgccttcgcctcgaccagcgaagtcatccgcgccgccatgcgcgcctggatgcgccaggaggaagagcacaaggaacgcatcgccgccataagggcgcgcgtgcgggaatcgctcgatgatcccaggccgagcctgagcctcgaggaaatcgatgactggctggagacgcttgcggtcgagccgagcccgcgatgaagacctacggtgtcacgttccgcggagcggcgcagcgcgacctcaagacgatcttcgactatgtattagagagaagcggcagccggcaaacgagcgtgttgtatctcaagcgattgcgggatcgctgccgacgcataggtgatgccccattcggcggcgtggcgcgacctgatctcggcgctgatttgcgtcttgcggtcttcgagcgcagcatcgtcatcctctaccgcgtcgaggacgacaggatcgtcatcaccaacatcttctccggcggtcgcgactacgagacgctgatgcgtgatcaccgctgagacacccatacgctgaggtcacatcagccttgccatttaagcataaccccgccacatttgcgggcgtatataaaaacttcattcacccttggcgccaagccatttcatgccgcggcgattgcctctgcgcttgagccgcgtattcgcgagcgatcccggacgatgtcggatcagatctaccaggcggccgcccttggccgcccccagcccaatttccgcgtcgtcgcgatgatcatcgccagcgccatgttcatggaacagctggacgccacggttctggccacagcacttcccaccatggcgcgcgatttcggcgtctccgcgccgtcgatgagcatcgcgctcacctcctatctgctcagcctcgccatcttcattccggcgagtggcttgattgccgatcgcttcggctcgcgcaccgtcttccgctcggccatcgccgtcttcgtcgtcggctcgatctgctgcgcgctgtcgcccaatctctggtctctcgttctttcccgcctgctgcaggggctcggcggcgccatgatgatgccggtcggtcgtctcgtgcttctgcgcagcgtcgcccgcaaggacatggtcaacgccatgtcgtggctattggtgccggcgctgatcggcccgatcctcggccctccggtcggcggcatgatcgtcacctatctcgactggcgctggatcttctacatcaacgtcccgatcggcatcctcggcttcatcctggtctcgatcttcatcgagaacttcaagggcgagacgaagaagcgcttcgacacggtcggcttcatcctctctggcatcgcgctcggctcgctgctcttcggcttcgagagctccagccgtccgggcgaggggatgttcgcgctgttcctgatcgcgatcggcctgctcttcggcatcgcctatctcaggcacgcgcgaaagcaccccgcgccgatcatggatttctcgctgatgaaggtgccgagcttcggcacctctgttatcgccggttcgctgacccgcatcacgcagggcgcgcaacccttccttctgccgctctatttccagctcggcttcggcctctccgccgccaaggccggccagctggtgacggcagccgccatcggctcgatggcgatgaaggccttcgcgccaaggatcctgcgccgcttcggattccgcaacgcgctcattttcaacggctttaccgctacgttcggctatgcgctctgcgccttcttccggccggactggccgctcggcctgatctttgccgtgctcgtcatgtgcggtttcttcatgtcgttccagttcaccgcctacaataccgtcgcctatgacgcgatcgagcgcgaccggatgagcgcggccaccagcttctacaccaccttccagcagctgatgctgtcgctcggcatctgcgtcggcgccttcgtgctgcatgtgtcgatgacggtaaccggcagcggcgacacgccgcaactgcgcgacttctcggccgccttcctgttcgtcaccgcggtctcgctcaccgccaccttctggaacctgcgcttctcccgcaccgccggcgccgacatcagcggccacggcggcaacaaggcggcagcgcacgccgagcattgagtgcggtcagccgtcttccatcgcagctgtagacgggcatttgtgctctctcgttcgtactgggcaattaaaacagcgccttacggagcccggagccccctcatccgaccctccgggccaccttctccccgtgggggagaaggggaggttggcgcgagcggtccaccacgagtctcttctccccaacggggagaaggtgccggcaggcggatgagggggctacaagcgccgccgtttccacccagccacacccgccccccttacatcttccccgccaccttcaccgcaaacgcatactcgaacgcaacctcctccagccgctggaagcgcccggatgcgccgccatggccggcgtccatgttggtcttcagcaacaccggcgcgccgccggtcgacttgtcgcgcagcttcgccacccatttggtcggctcccaataggtcacgcgcgggtccgtcaggccgctcagcgtcaggatcggcgggtagggcttggcttccacattgtcgtagggcgagtaagctgcgatctggtcgtattcctcgcggctgtcgatcgggttgccccattccggccattccggcggggtcagcggcagcgtgtcgtcgagcatggtgttcaacacgtcgacgaagggaacggcggcgatgacgccggcgaatttttccggcgccatgttcgagatcgcccccatcagcatgccgccggccgagccgccctcggcgatgatgtttgcgtaggaggtgaacttctgttgattcagatagtcggccgccgcgatgaagtccttgaaggtgttggtcttcttctccatcttgccatcttcgtaccacgcgaagccccggtccttgccgccgcggatatgggcgatggcatagacgaagccgcgatcgacgagcgacaggcagttggtgttgaagctcgccggaatggtcacgccataggcgccgtagccgtagagcaggcaaggggcggagccgtcgagcggcgtgtccttgcgatagagcaacgtcaccggcacttcgacgccgtcccaaccgggcgcgaacacgcggcgggtgacatagtcgtcgatattgtggcccgacggcacgtcctgcgtcttcaacagcgtgcgctcgcgcgtcaccatgttgtagtcgtagagctgcgatggcgtggtcatcgaggagtaggagaagcggatcacgtcgctgtcatattcggcggcaccctgcaggccgagcgaataggcctcttccgcaaagccgatcgcgtgctcctcgccggtcgcccggtcgcggatcatgatctgcggcaggccgtccttgcgctccagccacagcaggtggcgggcataggccatgtggctgatgatcagcgtgcccggcttgtgcggaaccacctcgcgccagttttccttgccgggattgtcaaccggcgcttccacgatcttgaaatccttggcctcgccgtcgttggtgaggatgtagaacacatcgccgccctcggtcagcgtgtactcgataccctcttcgcgggccgccaccagcttcggcttggcggtcaggtcgccggtcgggatcaagagatattccgaggtctcgtggtcgtgaatgtcgatgaagatgaagtcgtcgagcagggaaccgccgacgcccatgaagaagcccgcgtcctcttcctcgtagaccagccgatcttccgattgcggcgtgccgatgatgtggtggaacaccttggaggggcggtggttctcgtccagcgccgaatagaagaagctcttgccatcgggcgcccaggcgccgccgccgccggtgttctcgatcagatcgggcaggtcttcgccggtcttgaggtcgcgaaccttcagcgtgtagaactccgagcccttgtcgtcatagccccagatgccgcgatcgtggtcggtggaatggtcgatgccggccagccggaagtaggccttgccctcggcttccttgtcgccgtcgagcagcacggtgcgctggctctcatccttgatgtcggcgtcgcgcggaatgcggaaatagcgcggctgctcgccgccggtcacgaagaaggtgccgtaggcgaaaggcccgtccttcatcgggatcgagctgtcgtcttccttgatacgcccgcgcatctcggcaaacagcgtcttctgcagcggcttggtgtcttccatcgccgcgttcatataggcgttttccgcctccagatgcttgcggatctcggggtcgaggatcgagggatccttgaacatcgcctgccagttgtcggcgcgcagccaggcgtaatcgtccgtgcgggtaatgccgtgacgcgtatcggaacgcggcttcttcggtgcgacgggcgggttcggcagatctttgaagacggacaaggaaagctccggggtcggatttcaggttgtgaagagatagagacgccggcgccgccgatcaagcgccaaaagccgcccacgagagcgccatgcgaaggcgccgcgcgatcccgggcggtccctggcgaaccgcatccgtgcaaaacccggggaatgcccgttttgccttgatgtgaccacaatatttaagaaagtccgcactcatcctgcggaattccgccatagccggctggcccgaagacggccttggccgctcccgccgcgcggcgttccgcaatgagcttgcaaaggacttctcccgtaatgccgaaacgtatcgccctcgctctgaccgctctcagccttgccgcatccgcctttgtgcctaccgcattcgccgtcgatccggcgatcaagaagcagctcgaaaagctcgaccccgcgacccgcctggaacagagctgcgacaccgagctgatgagccgaatcaacaaggacgataccggctacaagcccgacaaggtgattgcctacaccttcaaggacccgattcccggcgacgaccggctggaagcccccggcgccgtgttccgcagcaagggcgactggtatcacctgtcctacaactgcatcaccggcccgcagcacatcaatgtgcgcgaactgagctacacgatcggcgacaaggttccgcgcgacacctggaccaagtattacctctacgattgagcccgtggccccggcggcaatcctctggcgcgtcgcctctctttgcattatgcagcgctcgaattttcaacggcatcgcactgttatgaatcgccttatcctcgctcccgtgcttcttctttccatcctgggcgcgtcgccgttcgctgcgccggcaaccgctgcacccacgtctccggccgctccattgccggaagtcgctgccgtgccgtatccaggtgggccggccgttccgaaggcggatgcgccgaagctcgtcgagccgcagctgcgcgtcgcccgctccggtatcaagggccgtgcccgcgtcgcgctcaccttcgacgcctgcatgggcaaggcggacgaacgcattctctcggtgctggtctcgcaacgcattccggcgacgatcttcgtcaccgcccgctggctgaagcgcaatcctcaggcgttgcaggtcatgctcgccaatcccgatctgttcgaactggaaaatcacggccagaaccatattccggccgtcgacaagccggtgtcgatctacggcatcgcctcggcgggctctcccgaggccgtgcgcctcgaagtccagggcggcgtcgacgccatgctcgcctccggcattccggcgccgcgctggtttcgcggctcgacagccaagtacgaccgttccgcgatcgccgagatccgcgccatgggctaccgcatcgccggctattcggtaaacggcgacggcggctcgctgctgcccgccgccgccgccgagaagcgcatctccgcagccagggacggcgacgtcgtcatctcccacatcaaccagcccacccgctccgccggcgagggcgtcgccagggccatcctcgacctgaaggccaggggcacgcagttcgtgcggctgcaggatgtcgaggatagcggggatgacgatacgacggagtagggagaggcatgtggcataacggtgaacgttgtgccgagtggtgacgtaacggtagatgccgagcccgtggccccctcatccggctgccgccaccttctccccgttggggagaagggaagatggagcgagcggctcgccacaagtctcttctccccaccggggagaaggtgccggcaggcggatgagggggccacgcgcacaagctaagccagcgccaacccactctaccgcaccgccatctccacccgcgccgcctcatctcgacgcaaaccgccgcccggcccatcgcgatccatcgcgaaatcgtcgaaccactcgcgataggtccccgacatcatcgcgccgatcacctgcgtcgcgagataggaaaacgtgatcccgttgccgccgtagccataggcgccgtagacatgcggcagcgatggcaccgggccgatcagcggcaggccgtccgcggtctcgccgaaggtgccgcaccaggcggtggcgacgcgggtgtcggcgcgaggccagatcagcttcatcttttcgcggatggtcatgatcttttccggcgccttggcgtcgcgcctggccggatcgaccgtgtggtcgtcctcgccgccgacgacgatgcggccgtcatccgtcgtgcgcatgtagagataggggtggctgtcctcccagatcagcgcctggtcgcgccacagcgttcccggctcctgcggcacggtcgccatcgcccagctggaggtggtgcggtgcagtttcggcatcgcgatatcgggcaggctgtagccggtcgccagcaccgccgtcttcgcctcgatcacgaagccgccatccgtctccgccgtcacgcggccgccctcgctgtgcactctcgtcacggaggcgtcgatgagccgcgcgccgtccctggccgccagccgcagcagcgcccatgtcagaagcagcggatcggcctccgccgagccgcgcgacaggatgccggcgtcgcggtcgatctcgaattcggtgaagagatcgcaatgttcgagataacggctcggcagtccgacgcgctgccgcagttctgcctcggcggcgagatcgcgcgcgccctcatggttgcgggttagatagagcgaacggcgcggcctgaaggcgcagtcgatgcggtgcgcggcgatcagcttggcgaggccggacacggcggcagcactgcggcgatagatcccggcggcgcgctcgaagccgtagaactgctcgagttccgtcagcgtcctgtcgatctcccattgcagcatcgcggtgctggcggccgtgcttccgagccccgggtgctcgcgatcgacgataacgaccgacaggccgcgctcggccagatgctggcccatcagcgcgccggtcacgccgccgccgatgacgagcgcgtcgacctgcaaatgatcggtcagcggcgcgaacatgggccgtcccgcgccatggccccagggcgaaaggccgctggtcaatcgatcctggctcaggctcttcagctcgatctcggacatggcggcctcacttcggcagttgcggcagctgcttttcttcgatgaacagctcgtcgatgatggtcatggcgatcagcgacagcggcagcgccagcatagcgccgacggcgccccacatccaggtccagaacaggatggcgaggaacaccacgaaggcgttgatctccagccgccgtcccatcaccgccgggaagatcaggttttccatgacgaggtggacggtgaagaaggccgccgccgggataagcccgatcagaagcccgtcatgggtgagaatgcccgccaccgcgatcgcgaaggtcatcagggtgatgccgagataggggatgaagctcgagagaaacgcgaagaacccccacagaaccggcgccgacagcccaccggcataggcgatgatggtcatgatgacgccgaggcaggcatagatcaccgaggcggtggcgaagtagaagccgagcacctgctcgacgccgctgatgacgcggatggcggtgagccgctgcgagcgctcgcgaaacaccatgatgatcgacttgcgcaggctgacgcggccgacgaggaagagcagcaatgccgcgaagaagatcagcgcctgtatcagggcgggggtgaggttggcggtgacgagacgcaggatgttgccggtattctcaagcagcttgtcggccgacatcgggccgctctggaaggtttccggcgtgatatgcagccacttgatgcgctcgagatagggcatcagccgggtcatcgtcctctcggcgaaggccggcccctcgttggcgagcgtcatcagcggcccggccagcgaattggcgaccaggaagatgacgagcgtcacggatgacgacaggatcacggcgttggtgatgcggggaacgccgagcttcgtcagcttctccgccagcatgccgaggatcatgccgatcacgacggcaagcgtcagcggaatcaggatgagcgacatcatgtagacggccgaaagaccgaggatgacgaagatgccgatgatcgcccaggccatggtgatgtccaggccatccttctccacgcgccgcaccggcgcctgcgccgcagcctcttccgccgccgtcatgttttgcgcccacgagctgacgcgacgctctccgatggcgatcttgctcgcctgtttgcgaatgccgttggcaatgcccatgaatggtcgttccccggaagcccttttgcttcgcagctagaacgcggcgaaactcgttccggttccttccgtttcaaagtgggaatgccgaattctcgccgcatctccggcgcattgttcagcacgcaacggcggggaggcagggccgctgcgtttcgtgcccgatcggagcaccgtcgcggccctgccagatgccgttggatggcgttttccgatgatccccagaaagcagaacgcccaccgcaaggtgggcgccggaagggacgttggcggagagaaaatcacgccgacagcgtcagcccgataccccagggatcgcgcaggaacacgccgccatcgcgcttttcgctcttgatctcgagttcgtcgagctttgccacggccttgtcgagcgcttgccggtcgttgaagcgcagcgcgtaatccgaaagcccggtcatcgcctcggtgcgcgcacccgcgccgcggctgttccagatgttggcggcgacgtggtggtgatagccgccggtggcgaagaagctggcgcccggatagcgcgccatgatcgtcaggccgagaacgtcgcgatagaattgatcggcctcgggaatgttgccgacctgcaggtggatgtggccgatcgccgtgccctcggccatgccggtccagctatcctgtggcgcgctctcgtagagcgcctgcaggtcgagccggtgggtcgccatctccacctggccgtcctggtggaatttccattgcatcggcgagcggtccgaatagatctcgatgccgttgccctctgggtcggagaggtagatcgcctcgctgaccagatggtcggacgcgccgtcgagagcgacattgttgtgcgcggcatggcgcagccagcgcgccagctcggtgcgtgatggcatcaggaaggcggtgtggaacaggccggcggcattgcgcggcgcggcgcggacatccttgcccgtcgtcaacgtcagaagcggcgtttcgccgacgccaagcacttcgccgctcgccgtcttctcgatgacatcaagcccgagcatcgactggtagaaggccgaaacggtcgccaggtcggtcacaacaagatgcgagtgatcgacataggcggggcgcgtcagcgcgtaggaagtctgttcggtggtcatctgtgggtctcctgcccgggtaatggagggcgtaccggcgccggcggtgtattgctgcccatggcaatgccagggaatgtccgccggttcatgcgcgtgatctgtcctctggccactgtacctttggtctatatggcgcatcgcgattgttcacagaagccccgtttttgacgatgaagcgttcgatattcgttgacgacctccacgcgccgacttgatccctatcgagccgccgacttgatcccgatcaaggcgccgacttgatcccgatcgaggcgtgagcttgatcccgatcaaggcgccgacttgatcccgatcaaagcgtgagcttgatcctgatcaaagcgccatatgtttttcgggaggatattgtcaccgttgcatgcagtcatagaggagttgcatcatgtacaggaagatcgtcgtcgccgtcgaaatcggcgcgctcgccaacggggaagcgaccttccgcaaggccgcctcgctgctcgatagcaatggcgagattatcctgctcaatgtcgtcgaggacgtgccgacctatctcggcgtcgatattcccgtcgatcttgtcgaaaacgccgccagggacgccgaggacaagctgcagaggctgatcgtcgccaccggcattcccgcccgtatcgagatcagccatggccggccggccagcggcatcatcgcttcggccgaggccaacaaggcggacctcatcatcctgtcctcgcacatgcccgatttcagcaactacttcatcggtgccaccgccgaccgcgtcgtgcgccacgccaaatgctcggtgctggtcgatcgtcgcaaggggtgacgccgatttgcaaaagggaggggaggatacggtaggtcgccgcgacctcccgtatcgacccggcttcacgaagatttatccgccccacacagcgcttgtgttgcgcgcaacgcgtttcgatgccacgatcccggtctaacaaggggcgttttcctgatgggcgagttcaacggcatccgctgggcttatgacaaatacgagctgatcgccgatggcatcgtccacggggtcgggcttgcgctcgcgctggtgggcgccaccgtgctcatcttctacgccactgtctggtcctcgcaaggcgagctcgccgccgcgtggatatacagcataggcctggtgctgaccctcggcatttcgttttcctacaatgcctggccggtctcgcgcaccaagtggttcctgcgccggctcgaccattcctcgatcttcatcctgatcgccgccacctataccccctttctcgagcgcggcgccgacaatccgctgcttatgggcatgcttgtcggcatctgggccgtggccttgatgggcgtgttcttgaaatgcgtctttcccggccgctacgaccggctggcgatcctgctctatctcgccatgggctggagcggcgtcatggtcgccgggccggtggccgaacgcatcccctatgcctcgatgctcctgatcgtcatcggcggcatcatatattcgctcggggtgatcttccacgtctgggaaaagctgcgcttccagaacgccatctggcacggcttcgtcgtcgtcgccgccgccgtccactatactgcggtgctcacctctctcagcatgagcccggtctgagatcgaaaggtttctacccggtcttcgtcagcaccaccacatagcggcaggtctcgtcgctgtcgttgcggaattcgcaatccaccgccggcccgagcaacaggcagtcgccgctttcaagcgcgtgaaccgtctcgccctcgacgaaggtcagcgcccccctgataacccagatgcattgccgaagaaacacgaaggaggcggccgggtaggcgacgcgcgcacccgatggcagctcgaccgcgacgatatcgaaagggctgccatcgggcgaaacgtggcgccgcgtatagccggtctcgggatcggtccacaacggctggtcgtcatgccggctcagccgccggcttcccgcctcggcgcgcgcgatcagcgatgacaccgtcagcccgaaggcgccgcagagcttgcccaaaagcgaggccgtcgggctgctttcgccgcgctcgaccttgtggatcatcgcccgcgaaacgcccgagtggtctgaaaggtcgctcagcgaccatccccgcaattcccgctcggtgcggacgcgatcacctagacagcggtcgaaattgtctgatatagtggacatagtgaatttatagtggatgaataatcatgacgcaagtcaccctcatacgcgacgccaccgaggccgatctccccgcgatccgcgatatctataaccacgcggtggagcatacgacggcgatctggaacgagaccgtggtcgatctcgacaaccgccgcgaatggttcgcgatgcgccgcgcccgcggcttcccggttctggtcgccgagaaggacgacaagatcgccggctacgcctcctacggcgactggcgcgccttcgaaggcttccgtcacacggtcgagcattcggtctacgtcgaaaaggaccaccagggcgccggcatcggcaagcaattgatgacggcgctgatcgggcgcgccggcgaaaacggcatccacgtcatgatcgccggcatcgaggccggcaaccaggcctccatcgccctccacgaaaaactcggcttccgcaacggcggcaccttccatgaagtcggcatcaagttcggccgctggctggacctgaccttcatggaactgcgggtgcccggctgagccacaccacaaacgcaaaacgcccgccacggtctcccgcggcgggcgtcatcaatccgaatcgccgctcacttctccggcgtgaacaccatcgaatggccgttgatgcagtagcgcaggcctgtcggcggcgggccgtcggggaagacgtggccgagatgggcgtcgcaattgccgcagcggatttcggtgcgcaccatgccgtggctgctgtcgcgatattccgtcaccgcttctggcgagaccggctcgaaatagctcggccagccgcagccggcgtcgaacttggtgtcggagcgaaacagcggcgcgtcgcagcaaacgcagctgtagagccccgtttcgaacgagtcccagtagggaccggtaaaggcacgctcggtgccctgctggcgggtgatgcggtactgctcgggggtcagctgttccttccactcggcatccgtcttgtgaaccttggcgatcgtcgtatcggccatggaatgctcctttcgcgcccttgtggtcacgcccttcttgtcacgtccctggtttggggagtgtttttgatctcctcgggaatgtggtgctgttcggccaaacgatcaagggtggggcaggggctgtgcacagctggaaggcccgatcgaccgcgccggacgccccgcgaccggcctttcgaacagccgaaatgcaaccgggattcctaccccgacgccagaatcacatgcgcctggatcttggcggcgatctcgccgttcccgtgcctgcttgtcagcgccgcctccgccgccttggtcgctgcctcgagcctgttggggtcccgcgcctcgatctcgccgcgcaaaggcgtcccctggcagtaggcgacggccacctcgcgggccgatggcgcgcggctgatctcggcgcgcgtgtcgatgtcgatctccttgaagccggcgcgcgcgaggtcgccgcggatctggtcgcggtcgtgatagccgtgcggcgtgcgttcggcgaaacgcggcgggtcgtcgggaaacacgctggccagcgcctttgtcacgtcgtcggcgaacacgttttcctcgatccggtcccagacgctgaacagaagcctgccgttcggcctgagcacccgccgtgcctcgcgataggccgccggtcgatccggaaagaacatcgccccgaactggcagcaggcgagatcgaaggtcgcatcctggaagggcagcgccatggcatccgcctgccgccagacgacgcggtcctccgccggctgccgcgagcgggcgtagtcgagcatggcctggttgagatcggtcgcgatataggtcgcgccgggcggcagcaacggcgccagcgcccgggtgacggcgccggtgccggcggcgatctcgagcaccgccctgggcttgaaggcggcggcccgccgcgcgaggtcggcggcataggacgcgaaaatcagcggtaccatgtggcggtcgtagttttccggcacggagccggcgaagatcctgtccgcttccagcatcgcctcatcctcccttgatggtgatcggcatttgctaaagtcatgaggctatcacgaaacgccatgtcccgcgcgtctttctctccgcatcgcccgttcggatgagcgccggctcatcataagagacagctaatgtcgccgcggatcccggttatagtggatgcgaagcaagcatcgggggatgctgaaatgactgaatccattgttgtcagcgtctattgcgcgatctcgaccgtgttcatgctgatgaccgcgctcgaaggctgggccatcaggggcggctggacgctggcgcgaggcgccggccttgccgcctgttcgctctggccgctcatgctgaccgcgtttttcctgcacgcggtgctgtcgccgaggcggatgccgcgtctcggccgcacccgctgatcaatcctctttgcgccgccatccgtccccgcgcgcgatgcgtccaaaccctcatttggccgatcaaagcttgagatggcggcgctcttcttctaaacccttagcatatctgatttgtttcggattcgcggatttcaacgggtaagggagagtggatggccgatggcgcggcattgacgtttgcggcactgtgcctgccatttctcggcgccgtcctcgcgccgtttctcgtccgtgtattcggccacaatgccgcctggctgctggcgctcttgccgcttttgtcctttgcccgcttcgcgggcctgctgccagagatcgcggcgggcatggtcgtgcgcggcggctatgcctgggtgccgagcctcggtctcgaattcgcctggatgctcgacggcctgtccaccaccttcgcgctgctgatcacggggatcggcgcgctggtcgtgctttatgccggcggttatctcaagggccatcccgatctcggccgcttcttctccttcatcttcctgttcatgggcgcgatgctcggcctcgtcgtctccgacgatttcctgatgctcttcgtcttctgggagttgacgtcgatcacctccttcctgctgatcggcttcgatcatcgccgcgaggcctcgcgccgcgccgccctgcaggcgctcgtcatcaccggtggcggcggattgctgttgctggccggcctgctgatgatctggagcacgacaggcgcctccgatctgtcggtgctgctgcaatcgggcgatctcttgcgcgccaacccctattacatgccgatcctgttgctcattctcggtggcgccttcaccaagtcggcgcaatatccgttccacgcctggctgcccaacgccatggaagcgccgacgccggtttcggcctatctgcattcggccaccatggtcaaagccggcgtctatctgctgatgcgcctcaaccccgccatgggcggcacggcgccctggatggtcatcctgccgctcttcggcggcgtcacgcttgtgatcggcgcgctgctcgccatccgccagaccgacctgaagctgaagctcgcctacaccacggtctcctcgctcggcctgctggtgctgctcaccggcttcggtgccgattacgccatcgaggcggcggtgctctatctggtcgcccacgcgctgttcaagggcgccctgttcatggtctcggggatcatcgatcacgagaccggcacccgcgacgtcacccgtctcgcggggttgagaaaggcgatgccgctcaccttcgtgatcgcgctcgccgccgcactctcgatgggcggcctaccgccattcatgggtttcctcgccaaggaggagatctacgccgcccttgcccatggcgatccgcgttcgatcctcttcgcggtcgtggtgatcgcggccaactcgctgatgttcgccattgccttcgctgtcgctctcaagccattcctcggcacgccggtcgaaacgcccaggcatccgcatgaagccccgccgcttctctggctcggtcccgccgcgctggccctgctcggcctgctggccgccctgttttcggcgacgacgcatgacttcatctcctcgcccatggcctcgtccgtcaggggagtggccaccaccatcaagatctcgctggtgccggatatcgggcttgcgcttctcctgtcgctcttcaccatcgcgcttgggatcgccgtctactggcggctcgagcgcgcccgcgcgctgatggcggcgttgttgcggaaattggggccggggccggaccagggcttcgacaacgccatatcgggcctcgtctcgttctccgtgcgcatcacccgcatcctgcagcccggccggctggagatctacgtcacctgcaccttcctcgcggtcgccgccatcctcgttctgccgctctggctgttcggggagggaccgtcgcttcccgcctggccggccggcgtgcagatccatgaatggggcgtcttcctgctcgccgtgatcggccttgtcgccgtcgtcatcgcccgcgaccggctgacggcgatcgtctcgctcggcatccagggctttgccgtcgccctcatcttcctgctcttcggcgcgcccgatctcgccttcacccagttcatggtcgagacgctttcggtggtcatcctggcgctggtgatgaccaggctgcgcctgtcgcgcaccgacccgcgccccatcagacagatggtgttcgacggcgccgtggcgctatcgtgcggcgccggcctgacgctgctgttgatgaaggcgaccgaagcgccgttcagcaccacgctcagcgatttcttcaacacctattcgaaaaccatcgcccacggcgccaatgtcgtgaacgtcatcatcgtcgacttccgcggcaccgacacgctcggcgagatcgccgtcgtcgccatgaccggcctcgccatcctggcgctgatccgtatcagggcgggaaccgagcgcaagcttgccgaaaacgatcccgatgcgcccgatgacctcggagtggaacgcccatgaacacgttgatatcacgcaccatcgcacctgtgctgaccgcgctgatgctgctcttctccgtcttcgtgctgttgcgcggccataacgaacccggcggcggcttcatcggcggcctgatcgcggcgtccgcgctggcgatcttcggcatcatcaggggcaccggcgccgtgcgccgcgccatcgtcttccacccgctgtcgatagcgggtgccggccttttgatggcctcggtggccgggctgatctccatcgtcttcgccgtgcctttcatgaccggcctctggatctatcccgagatagcaggcgtcacggtgccgctgtcgacggtcctgctgttcgacatcggcgtctatctcgtcgtggtcggcgcggtcacgtcgatcgcgctgtcgctggaagagcgggaggtcgaatgatggagtcgctcttcgccatcctggtcggcctgttcttcaccgccgccgtctatctgatgctgtcgaaattctcgatccgcatcatgctcggcatcgccatcctcggcaacgccgtcaacctgctgctcttcacc

SEQ ID NO: 40 - DNA, 44253 bp, Rhizobium matallidurans
  source 1..44253: mol_type = genomic DNA
ccgccggtcacgcttgtcatcttcggggccaccggagacctcacgcggcggctgcttgttcccgcgatcatcaacctgacgcagagcgggctgaccggcgaggatctcggtattctcggcgtcggcatcgaacccggcgacgatcagatgctggtgacgcggctcgacgatttcctgaagacgctcgacgatggcggggcgcatgccgaaagcgacggctggaagagccttcgccagcggatcgcctacacgtcgggcgatttcaccagggacgagatctatctcgacatcaaggcgcggctcgagaaggcgcctggtggcaatgccgccttctatctcgccgtgccgccgcaattcttcgggacgatcgtggagaagctcgccgaacacgggctgacgaaggagaccggcagcgcgtttcgccggatcgccatcgaaaagccgttcgggacggatcttgcatcggccaaggcgctcaatgcgcgcatcctctccaaggtcgcggaaagccaagtctaccggctcgatcattttctcggcaaggagacggtgcagaatatcctgaccacgcgcttcgccaacatgatgatcgaggcgctgtggaacaacaattatatcgaccacgtacagatcaccgccgccgagaccgtcgatgtcggcagccggggaaagttctacgacgcgacgggcgcgctgcgcgacatggtgccgaaccatctgttccagctgctggcgatgatcgccatggaggcgccgaacggtttcggggccgaggcgatccgcagcgagaagagcaaggcgctcagcgcgctcaggatctacacgcccgacgaggcagccgagcatggggtgcgcggcgtctatacgggcgggccgctcaacggcaatccggtcaccgccttccgcgaaaccaaggatgtgtcgcccgacacaaggacggagacgttcgtggcgctgaagctctatgtcgatacatggcgctgggcgggcgtgcccttttatctccgaaccggcaaggcgatgaaggcgcgcgacacggagatcgtcgtcaccttccggcaggtgcccttcgcgcagtttcgcgagaccgacatcaagcgcagcctgccgccgaaccggctggtcatccaggtgcagcctgatgaggggctgagcgtcgagctgtcgatcaagtcgccggggctttccgtcgacaccgtgcccgtgtcgctcgacttccgctatgccgacaaattcgatatcggcaagatgaccggctacgagtccctgctctacgatctcttcatcggcgaccagacgctgttccagcgcgccgacggcatcgaggccggctgggccgccgtgcagcccttcctcgatctctggggcaagagcgacgagcagccggaaccctacctgcctggaagcatgggaccgacctgcgccgacgagctgatcgcgcgggatggccggcaatggcacgagctgggcgtcattctccacaaccaaaaaagcgcacgccaataaaaatacactcttatgttagtatatccttgttcatggagcgccttcatcgcactgcgaaaataaacccataataacttacgggtaaacgctcgcttcgccgctgaaaggcggtaccaagtacaaaaaaggtagaagttgaccggttacttgcctccatccaagcttttactgctgacggcgttgcttttccagtgcgacaaagaaggcgggggcccgtcacaccccgacgggcccttctcgccttcctagttgtttttttgctcatgtcaggcaaaaaaagcgaattgttaatgagcgattaacatatttacttgcgctcttcagcggccttgctaaatctaccctctaatctggggtattgatgatgacggatattcagtcttccaagaatcgatccaattcagaccagcgaatggagacctgccggtccgaattcgagcccatgctcttcgaactgatccgtgacggggaaaagagagggtggaaagccgccgaaatcgccatggctctcgccgacgcggctgacgacgtcatcctgaagcttgcacgcgaaacgaaaagcaagcactgacccccatccggtccgattgcgccaggatcgattttccgagccgaaacccactttcggcgagcggcgataacacatacattcacagctgatttggcccgaggtgattcatcgtgcgatgcatctttccggccgtgttgtcgcgcaacgaaggaggcgatattgcagtggtttgccgcggcacttctggcttgtggatgcgtcaatctggccgcattcgccaacttcccgccagcccgggattatctcgccacgacttcgtgcagcctcagcgccacgcccgctgcctgccgcaacacccgggccgcctgggtggcgacctatgcgagcgcggtgggcggcgcctatgacagccagaaggcggtggcgcagtgcttcagcaccggatgcgacaaggcgatcgtcgaagagcgggttctcggctgcgcgtggcggcatgtgatcgtgggttccaaacacgcaacgaccgccgatgccgaccgtgcgtcggtggaaacgttctgcggcggtaacgcactcgacgaggccgaccggcagacggcgcgcgatcaggcggctgtgtggatgcagttggttggcgtgacgcagtagggattgtttgtggtttgggtggtggctggcatttgcgcgtgtggccccctcatccccggtgcagcaagctgcacctgaatccttcgggccaccttctccccgttggggcgaagggaagatggagcgagcggcccgccacgagtctcttctccccaacgggagaaggtgccggcaggtcaggtgcaacttgttgcaccggggatgagggggccgccagcacaccacccacccgacagcaaaacgggcggaaattccgcccgttgtcgtcactcgtcaaaccaagccgatcaaacgaactggctgagacccggcaccgaggccacgacctcgtcgacgacttccttgccggcatattgttcggcgatcgcgatggtttccttggcgagcgcggtgatctcgcccatgccgagaccttccgacatgagctgctggccgagcgccatgatgccgccgccgccgagcgcgcccatgaggctgccgagaaggccgccgccaccgccttcgccggcgccgttatactgggccaccagatcggatgcgccgggaatggcttcgatcatcttggcgaccgggccatcggccgcttcgcgctggagaaagccaagcatcatgccgagcgacttttcggccacttccgacggaatgccgacccgcgcggcgatctgatccacgatttcattcatcgtcatcctcctggttttattgacgttaacgtcaacgttaatcgactttgtgtggcaactcaaggcgtccgcgacgcgatgatcgcttatccagttttccttttaatgcagacagttgtcggcattgcggtccctgcttataacagtcaaagcatattacaatgaacatgcggatgatacgcaccgcatttcgacgcaatcggctttggtcgccggcagggagacatttcgcatgctcgaggatggcaagatctacatcggtaccagccgcaaccctgatgacagcatcaacacccccgaatatctggagctcaaatacggcaaccgccacgggctggtgaccggcgccaccggcaccggcaagacggtgacgctgcaggtgctggccgaaggcttcgcgagagccggcgttccggtcttctgcgccgatatcaagggcgatctctccggcattgccatgaagggccagccgcaggactggatgaccaagcgcgccgagcagatcggcttcggcgattacgaagcggaccagtttcccgtcatcttctgggatctgttcggcgaaaaaggccaccgggtgcgcaccaccatcgccgagatgggaccgctgctgctggcgcggctgatggatgcgtcggagccgcaggaaggcgtgatcaacatcgccttcaagatcgccgacaagggcggcctgccgctgctcgacctcaaggatttctcggcgctgctcaactacatgggcgagaacgccaccgagctttccagccagtacgggctgatctccaaggcctcggtcggctcgatccagcgcgcgctgctggtgctcgagcagcagggcgccgagcagttcttcggcgagccggcgctgaagatcaccgacatcatgcgcaccaacgatcgcggctacggccagatatcggtgctggccgccgacaagctgatgatgaacccgcgtctctacgccaccttcctgctctggctgctgtcggaactcttcgaggaactgccagaagtgggcgatccggagaagccgaagctggtgttcttcttcgacgaggcgcatctgctcttcaacgacgcgccgaaggtgctgaccgagcgtgtcgagcaggtggtgcgcctgatccgctccaagggcgtcggtgtctatttcgtcacccagaatccgctcgacgtgccggaaacggtgctggcgcagctcggcaaccgcgtgcagcacgccctgcgcgcctattcgccgcgcgagcagaaagcggtgaagacggcggccgatacgttccgtcccaacccggccttcgactgcgccaccgtgatcaccacgctcgggaccggcgaggcgctggtttcgacgctggaggccaagggcgcgccatcgatcgtcgagcgtacgctgatccggccgccatccggccgtgtcgggccgctgacggatcaggagcgccagcaggtgatggacaagagcccggtgctcggcctctacgacgaggatatcgaccgcgaatccgccttcgagatcctggcggcgcgggcgcagaaggcgtcggattcggatgccgccaagcaggcgcagccgacacagccgacggaaggaagcgcatccggccgctggacgctgcccggcttcggcgatgacagcaaggacgagaagcaggcgcaagcgcgcccccgctccggcggctaccagcgcgagacggtggtggaagcggcgatgaagagcgtggcccgcaccgtggcgacccaggtcgggcgggcgctggtgcgcggcatcctcggcagcctgaaacggtgaccgtaaccccccaactcttttcggaagcgaccgcgtgacgttgatttggagagagttgaaccccgcggaaaagcagatcatccagcgactggcgcgacacgccgcgcgcggcgaggtgccgccagcctgggactgcgaccactaccgcgccgccgagatcgacgcatccggctcgctgcggcttcgcccgcgcgacaggcttgaagcggccaccgaactgccggcgcaccccgtcgcttcgggctatttcgacgacaaggaggtcgccgatccctatgggccgcttgtcgatatcatcctgttttcggccaacgggatgctctgcgagctgcagatctaccgcagcgacggcggcgcgatcctgaaggcgatcgaggccgacgcgatcttcctgatcacggtgcacgagcatcacggttgaattttcgtacagcaatctgtcagcgcctaaaattggcgcccgaaatacgccggtgaaaagctttggatggactgaacaaacttagcgccttcatatcctggatcgcctcgatacccacggaagtttgggtgggttttggcggcgtattgctaaccgcagttctgaccgcgatcacgagtgcccatttcgcaggacgtgagtttcggaagcaacggagaagcgaagcgattgctgtggcactgaaggtgtccttgattgccaatgacttcgcggagaagcatcgggcataccaagatgcgcgaaataagcataaagctcacaacgatccgcgtcgtcctttttggagcttcatcggggttaaagccgggcgacatgagcggatcactatcgagccgaacgagctgctagtcttcatcgaagcgcgtgaatacgagatagtaaggcaacttgccgttctcgatatgcgtcacaaagctgtgtgtgatgcactcaacgagttcgccgaccttaagcgtgaacttcgttcgcgcatgacagggccaacatcgatcggcgatcacgtgctgaacatcgcggacgttttcgatgaacccacgcaaattatactcgttcaaatgggggccctgagccagtcgacagcggaccttttaccaaccttctctgccgaagcgcttgcgttgtgcagtagcatcaccccagcgctccgacgacacctgaaagacaacaaaatcccgttcttcgcaaagccgcccagctgagttggacgatcacctgatctgggcggagccattgagcgaacctatttcctcgaccgagcatcacggttgaattttcgcggccgcaatgctatcgctgggatacttgagaaaggagggttgcgcgtgacgatatatttccgattcaatcgccagcgtggccccgtcaacgccctgcagatgcgtttgcagggctgaccagagaccgtttctcgacacctcttcctggtccgcccctcgtggcactgcaagtgtgagcattttgctcgcctgcatgtttctagatccccgagcttgagcatacgcgcgcgatgaaggctgatgcccgcgacgcgcctgtgcctgctcgcaagaccagagcaagatcatgacgacaatccatatccgcaatctcggcatcactctcggcaacccgctgttttccaacctcacgcttgccatcggcgcgggcgaccgtatcggccttgtcgccgcgaacgggcgcggcaagtccacgctgctgcgctgccttgcaggcactatcgagccgagcgagggcgacatcatccgctcgcgcgggctcaccatcggccatgtcgagcaggacgtgccgcctgccctgctttcgctgccgctgcacgaggcggtgctgaaggcgctgccggaggaccagcagctcaacgagagctggcgggtcgatatggtgctggccggtctcgacatgccggaagagatgcgcgagcggccggtgggccagctcagcggcggctggcagcggctggcgatgctggcgcgggtctcggtgaccgagccggacgtgcttctgctcgacgagccgaccaaccatctcgacctcggcaagatcgcccggctggaagcgtggctcgacgcgctgccgcgcgacatgcccgtcatcatctccagccacgaccgcgcctttctcgacgccacgacgaaccggacgctgtttttgagacccgagcaatcggcgctctattccctgccgtactccgaggcgcgggcagcgctcgacgacagcgacgcggccgatgcgcggcgttaccagcgcgacatgaagacggcggagaagctgcgccagcaggccgccaagctcaacaatatcggcatcaactccggcagcgacctgctcgtcgtcaagaccaagcagctgaagcagcgggcggagaagctggaggacgcggccaagcccgcgcatctggagcgctcctccggcgcgatccggctcgccaatcgcggcacccacgccaaggtgctggtgacgctcgacgacgcaatggtggcgcggcccgacggcacgccgctcttcaggaccggcaggcagttcatctgccagggggaccgcatcgtcctcctcggcgccaacggcatgggcaagagccggatggtgacgatgctgcgccgcgcgattctggaagcagacggcgccgtcgagggcatcaagacaacgccgtcgctggtgctcggctatggcgaccaggcgctcaacgagctgatcgacgaggagacgccgatgcggatgatgctgaggcgcttcgatgtcggcgacgcgagggcgcgggcgctgcttgccggcgccggcatgacgatcgagatgcagggcaagccgatcggccggctctcgggcgggcagaaggcacgattggggatgctggcgctgcggctgaccaacccgaacttctacctgctggacgagccgaccaaccatctcgacatcgagggtcaggaagcgctggagagcgaactgatggcacggcaggcaagctgcctgctggtctcgcacgaccgcgacttcatccgcaatgtcggcaaccgcttctggctgatcgacggcaagcgactggtggaagtggaaagcccggaatcgttcttcgccgcggccgcgtcggcgggctgaacgggacgcggggcaggcatcggaacgaggacggcgtcagaacgaggcgggcgcggtggcgagcacgttgatcttgccgccgccgatggcatagaggctcaggcgccgctcgacctggcccgatggcgacaggcgaaacagtccggtgacgccgcggaagccgaccttgctggtcagcgtctcggcattgaggcccgtggcgcccttgctgcggatgatgccggatgcgatcgcgatggcgtcgtagccataggcggcgtcggtggagagcgggcgcttgtaatggcgctggtagcggtccgcgatcagcgtcgccgcttccggttccaccatggcgatcagcgtgccgttggcggtcggctcgcgataggtctgcggcggccaggcgctggtgccgacgaaattgaggccggtctgaccgcccgccttgatcgccccctcgatggtggtggtgatggcggtgcggccgaggatgagcacggtgtcggcggtctgcagctgcggcttggccgtctgcacggcggcggccgcggcggcatcggtgagatcgtagcgggcgatgccgacgaaggtgccgcccgaggcgcggatggcgtcggccagcctttgatcgcttgccggcggcagatcgcgctgggcgaagacgaagaccttcttgcggccgctggcaaaggcggcgcgcacgccttccagcgcgctatcgatctcgccggaagcgagattgtagacgttgccggacgtggcgggcacggccgcgccgagattgaggagcggcgggcgctgatccgacggcatggcggccacggcggcggtggtcgccggcggcaggtagctgacgagaagcgccgagcttctggacttggcggcggcgacggcggcggatgccgcggccgggctcgtcacatcgacgaccttgacgaaggcctggttggcgccgagctcgccgatgccaagggcggcggcatccctgatatcgcgcgacggcccttcgaacagcccgctcgatcccttctgcatcagcagcgtgatctcagcgccgttttcgccaaagctctcctccacctcgctggagggcggcttgatgtcgttggtcttgacgttcttggcaatgccatcgacgccggactggcaggcggccagcgcggagcaggaaagaacgacggagagaagcagaaacgaccgcgcggcgcgcgcgccgttgcagaccccgcgaaaggcgccacgtaaaccatgcgcgccacgcgcctcatccctgtccttcacgatcactgcttcccccaaactccataggccgtctgcagcggccatttcgcggcctcatatctgcataggcacttcgcgaaagcaaacccttcccccaaacttggttgacggaaaagctaaaattttcagcttttttgagtggataactttgttcaaacttatccacgcttccaaacccgatgtttatggctggcgtgtagttttctctcaacaagtggagaaactaagcccgtgacccaaagaacaaaaacaaacaaaatcgctttcattgcacttctttcggcattttcttctttttcttacaatggcgcactcgcatctgctccttacaatacacagagcatcggcacttcttactccatctttacttcagcaggcatagccgggcaggcagcgaacgctgtcagcgctggcggcgtggcgcggctgctcaatctggccggacgcggtatcgcgcaggccgtcggctcgatcgatcttgccgcgctgaaggccacggcaccggtcgcggcgcccgcgtggagcccggagaccaccgcatccatcaagccggcgacccgcccttcgatcgccgcgcgtcccgacaataacggcgtgttcggctccgtcgccatccccttcaagcgccttgccgcgctgaagaaactggcgccttccatcgacgagatgaccagtggcaccgccatttcctgcggcgccggcaagtgcacggacaccgtcaccacgatcaaggcggcgctcgccaagacgtcggaagcatcgctgcgcgacaagatgaacacggtcaacgccacgatcaaccgcacgatccgctatgttggcgacaccgaaaactccagcgaagcggattactgggcgaccccttcggaaacgctgaagcgccaggaaggcgattgcgaggacttcgcgatcctgaagatggctgcgctctatgcccagggcgtcgatccgaaggacatggcgatcgtcgttctgtacgaccagaagcgcaagttctaccatgccattctctcggtttcggccggtggcaaccgttatgtgctcgacaacatgcgtgacacggttctcaccgacagccgtctgccggactacaagccgctctattccattgccaacggcaagggatatctgcatggttcgcgcgccggcaacaaccagatggcatcggccatgccgctcgagaagattgctccgggcgaaggtgttgccttctgacaggaaggcaatggcgagggcgggaccaaccaccctcgcatcccgcttcgataccgaagcgaagccgccggccctgcattgccggtggctttttctttgacctcaccgcagtcagccaagacgggttgagagttctcaggagttgcgatccagcctaaactcgatcgagtggagctcaggaagggaatctggccgcccgccccgaaaccttcgcgcggcgccgtcgttttggctgcgacgtttcatgacggaggagatgcccgatgaccgagtttaccggaggatgcctatgcggccgcgttcgcttcgcggcatccggcgcgccttatcgggtcggcatctgtcattgcctggattgtcgcaagcatcatggggcgctgtttcatgcttcggcgatcttccccaaggatgcggtgcgggttgagggggagacgggtgaatacaaaggacgatgcttttgcccgcgctgcggctcgccggttttcgggttgagcggcgacgaggtcgagatcaatctcggatcgctcgacgagcccaaccggttgcagccgacctatgagctgtggaccatacgccgcgaggcctggcttcccgaatttccgttgaaacaccgatacgagcgcgatcgcgacgcggcgggccgtttcgaggactgaggcggcggccggcacgagccgggcctttttttcagtagcgggagatatagccgatcagcatcgacttctcgtgcgtcggcgccagcgccaggttgatctggcccttcatgctctgggtgccgacggtgatggtgaagcctgtcgcgagcgtcttgcccttgttgcgcgacaaggtggcgatggcttcctcgatctgggtatcgattgagaaacgcaggctcttggtcagctgcgcgagatcgccgagcggcaggcgctggcgcagcatcgacaggaaggcgtcgttgaagagctgtaccttcttctcatgcgtcaaaaggatggccggcgacggcgaggcctggatgatggcgttgacattggcgagcgacgagatgtcctcgaccgtatccagccggcgcagcgcccatttgaggctgagcacgcgcagcagcgaggcgagattgccggattccggcatctgcgaggcggtgtaatgcacgagatcggcggtcgacatcttgcccgaggcggacatgcggccaaggccgtcccaatagatgcgctccagccggatgccgcgacgctcgccgccacgacccgccactgcccggaaacgcggctcgatctcctcggcgtcgatggcgggcagttgctcgtcggtcggctccagatcggatgcgtcgttggcgccgggcttgacgatcagcatggtcagcgctccgtcagcgcttcggtgcgcgccttgttgatcggcttcatcagatagctgaggaccgtcttgctgcctgtcatgatctcgaccgaggagaccatgcccgggatgatcggaaaggtcttgccgttgcgcgtcagctccgacttgtcggttttgacctggacgagatagtaggtctcgcccttctccttctccaccagactgtcggccgagatgttttcgaccacgccctcgagcccgccatagaccgaaaagtcgtaagcggtgatcttgacgatggccggctggccgcggcggatgaaggcgacgtcgcgcggcgagatcttggcttcgacgagcagcgtatcggcggtcgggacgatgccggcgatgacgcggccgggatcgacataggcgccgatggtgttgacctcgagcgtgttgacgatgccatcgacaggcgagcggatatcggtgcgcttgacgcgatcggacgcgccgcgcacggtctcgtcgacgaccgacagctcggccagcgcctgggccttgtccgtcagcgcctgctggcgcagcccgagcgcgaggtcgccgagctgcaggctggcttcctgcacggccgcctgaagacgatcgatgctttcctgatagaccctgagctggcccttctggtcggtgagctcgcgctcggtcttcagcacctcggtctcggcgatgagcttcttcctggcgagcgggctgatgagatcgtactggcgctgggcgccatcgatgttctgcgtcagacggtcgatattggcgcgcgcctcgctgagctcgttttcacgctggcgcacgcgctccttgagcacgccgagcttgttctcatagctggcgcgaccggcggcgaagagctgggcttcgttggcgcagacgtccttggcgacggccaggatatcctcgggacaggcgtagggcacgtcatacttgccctcttcctcgagcttcaggcgggcaaccttggcgcccagagcgcgggccttggcgaccgattcgccgagtgtcgaggtggtggtggtgttgtcgagctggacgatcagctggcccttgcgcacgacctggccgagaacgacggcgatctgctggacgacgccgggttcggacgactggatgatctgcgtcttcgagacgggaatgaccttgccctcgccgcgggcgacctcgttgatcttggcgatcgcggcccaggcgacgaagctggcgatgaccagagccacgaggcccaatatggcgcgggcgagaaagggcgggttgtcgtactggttgctcatgacgccttcaccgtgtgattgagcggggtcacattggcgacgggcgccggatcagtgacgacctgcgccaccggcattgccgaggagcccgcgggggccggcgcgaccgaggtgacgggtgctacggacatggcgacgggcgtgaccggcacggggcccggggcgacggcgacaggagcgccgacgaccggcaccaccggagcctgtccgggggccggcgtgcccggcttgcgctgcatggcctcaatgacggcctgcttcggaccatcggcgatgatgcggcccttgtcgatgacgatcaggcggtcgaccagttccagcatgctgtagcggtgcgtggcgatgagcagcgtcgtcttgcggtcgaaggccttggacaggcgcaggatcagattgcgctcggtcgcgaggtccatggcgccggagggctcgtcgaggaacacgaccttggggcgggtgagcagcagtcgggcgatggtgagcgcctgcttctggccgctcgacagattgctgccgcgctcgccgaccggcatgtcgaagccgcgcggatgattgccgacgaattcgtcgaccccggtcatgcgggcgacctcgagcaactcctcgtcggtggcgtcggcgcggccgagcagcagattttccttcaccgttcccgagaacaggtcggaggactggccggcgacggcgacgctggcgcgcacttcggccatgtgatactggcggatatcgacgccgtcgatcaggacacggccgccagagggcgtaaagagaccatcgagcaggcgcccgagcgtcgtcttgccggagccgatgcggccaatgatgccgatgcgctcgccgggcgtgacgttgaaggacagcttgttgatgacgggatagtcggaacccggatactggaacgagacatcctggaagctgaaggcgccgcgggtgatctcgcgattgacgaagccgaccgtcgaggggcgatcgtcgggctgctccatgatcttgtcgaggatgcgcagcgacatggtggcctggcggaagcgcgccagcgtcatggcgatctggccgagcggcgcgccggcgcggctggccagcatcacggtggcgacgatcgcgcccatggcgatgcggccctcggagaactcgtaggtgccggcgatgacgatgagcacgctcaccatctgctgcacgaacatcgtcatgttgatggcgttggtggagacctgcttgatctcttcgctggtgcggctcgaatacttgctgagttcctgccagcggcgcagcatggtggcttcggcgcgaaggctcttcaatgtctcgatggtcgaaatcgtttcgaccagcagcgactggcggcgcgccgcctcgttggcggcggtcgtcatgcgcttgccgatcgcggcctgggcgtaaagaccgatggcgaccgagagcacgaaggcgacggcggggatgaccaccagccagccggcgatcaggtagatgacggcaaggaagatgaacaggaacaggctgtcgatgatgacgccgatggtgttcgaggtgaagaactcgcgcacgaattcatactgcgtgacgcggttggcatattcgcccgtcgacatcgggcgcgaggccagcgtcgaattcagcaccttgtcgaagagcatctgcgacaggcgcagatcggccttgcggccggcgtagtcgatcagcgaggagcgcgcggtcttcaggaggaaatcgaagagataggcgagcgtgatgccggcggcgagaacccacagcgtcgggatcgccttgttgggcagcacgcggtcatagacgttcatggtgaagagcggcgagccgagcgcgatcagattgatgaacagcgcggccaccatgacgcggacataggtgcgccagtaaggcgccagcgtcgtcgccagccagtggcgcttctcgatctcgacggcgctgccgaccagcgcttcctcggaggcgttctgataatagagcgtgaaggcgaaggccatgcgcggcttcagcgccacgagctgctcgcgcgtcaggcgcgcggtcgcgcccgcgacaggaacgatgtcggtgacgtaagagccgtcctcggccatctccagcagggggagcacgccgccatcgaacgcgacgatggcagggcaatcgaaattgcccagccggcaatcgcgctcgggatgcttgatcacctgaaggccgatgcgctcggccatctgctcgacgtcatcaccctcgagcgattcggtgatctcatccggaaggccggagaagagcaccgtatcggagcttggtcgaccatagaacgctgccacggacttgaacgcggccttgaatgtttgaagcggcatgctgccgttcgtctcagatgcaacgttccgcatgttccatggtcacctggttactgctgcctgatcggcgccagcagatccatcggcatgccagccttctgacgagagtcgacttcgacatatccgggattctgcgcggtcgcggggatagcaaactcttcccgcgcataaggcttggcctgctcgaccggccgcagcttcatggtctgaagcagattgccggaggcggcgaggatcttgtactccgcaaacagcgaagcgacgcgcgccgtgtcggccaggaccttggtgttgaagcgggtgttctgcgcatcgagcacgtcgagcagcgagcgctgaccgaccttgaactgctcgcggtaggagctgaccagctggttgttgatcgacgactgcttggcaaggatgcccgacagttcgccgcggctggcgcgctcgttccaggcggagctcaccgattccttgacctcgcgctggacctgggacagcacatagcgctgctcgccggcacggcggatctgctcctgctcgcgggccacatcgatgccgccgcgatacaggttccagcgggcgacgacgcgcacctggtaatcgttggtgttgccgagattggcgtcgatatcgtcgccgacgcgggccgtgccctcaagattgaccttcggcaggtagttggcgcgggcgccacgcacaccggcgtcggccgcatcgatatccgcattggcggagaagatgcgcgggctgttcttgttggcgacgaagagcgcgtcatcgagcgtcttcgggatatacttggcgaccgaaggcggggtctgcggattgacgatcggctggccgacggccttcatgaagcggatcttggtcgcttcgagctcttcgagcgcctcgcgctggcgggccttggcggcctgcaggcgttcgctgccctgaagacgatcggcatcggtgagcgcgccgcccttgatgctttcattgatgtcgccgaccatcgccgtgtggaaggagacgttttccttcgcggcggcaacgatctgaacctgcagcatatattccagatagctctgggttacttcgagggcgagcgcttccgagcgttcgaggacccgaaaggaggcgccatcgacgcgcgatgcctgctgatcgacctgcgacttgcgcgcgccgccgtcaaacagcgtctgcgtgatcgtcactccgacatcgccgggagacaggtagtcgctatccgacgtcagcgtgccggtcgaggaattcgacaagcggcggcggccgacaccggcctcgagatccaccgacggcaagtatagcccgcgcgcctgacgaagctcgaattcgatcgcttctttgtttcttgcggcctgaagtatctgcggattggttttcatcgtcgtttcgatggcctgctgcaaggacatcgcattggcgtcgacgaacaacgagaaattcagagcaacagtggcagacaatgctgcaataatgcttttggttttaaacaagacggatgcccctcaacatctaaaattcaccgagtgaacccgtataccgaacgctttcattcggcaaacaagtaacaccaatttttccacattccaattgcggcacaggtctttcctgcggagacggttaattcccaagtatcactagctaaagctagaattttacagggttttttaacgccaacttttcccgtccgtgtttatctgccgttacttccacagggacctgccccgcgatgaaattccgccagcgttaccaatccgcaacaaacctttccgctcttcgcatcgccgcgatcgtgtcgatctgcttcgcggcctgctcggtcggttttttacttatcttaaaccttctgatgccggagcgaccatttttggtagggttcgtcggggccgccgcaatttcgctgtttgttgcatttccgctgctgatgatgctgcagctcaagaacaacgagctgaagaaactgcaggaagccgtcaactattctcaacggcacgacagcgttaccaagacgctcaacggaaccgccttcgcggcagccgtcgaacactatatcgaccgccgcaagcggatctccaccgacgcgggcggtgtgatgatcgccgtggtcatcgacacgctcgacgccatcagccgccgctacgggccgcaatgggccgacacggtgatgcagtcgctggccgcgatcacccagtcctcggtgcgctcgggcgatctcgtcgcacggcttgcgaccaacgaactcggcgtgttcctgccaggcgccacgatcgagaacgcccaggatgtcggcatgcgtatccgccgccgctgcgaacaggcggccttcacggccggcgacgcgccgctttcgctggacatccgcctcggcggcgcggtcttcgacggcccgaccgacttcaaccatatccgccagctcgccgatgaaatggccatggaccgcggcggcggcgaagcggaagacgtgccgatttcacggctgccggcggcctgagcgccacacggacaaagcgacagtcacgacatggatttggaggcgccccgggcgcctcttttcgttttgatgatcgcgggactggagagtcgcggttcgctcaccgcgacaccttaggcggaggcggtggagcggtcgctcgagagccaggtgatggatccgcaatgccctggatgccaccgcctcccccggcaagatgcgcgcacccgcccgcatcgcctcacatccgtcctcaagaaagcaaacagtccacgcggctggatcggccgaccgccggccgttcgcgtggagcgcgccgccaaactcgcggaggtgctccgggccatggatcgcgtggggggcacctgctcccctcgcctgcccgacatgtccttcagaacgcgaaaaaggcgctcgcgcgcctttttccctgtcatcggcggagcggtccgcctgtccctgatcgcttagccgacatgcggcgcggtggtgctgtcctgcttgtcgtcgaacaggatcttgacggcttcctgcgtgttctggagcaccgccacatcctgccagccgccattggcgttgacgctgaccacggtgtctgcgcccgacgtcatcgtccggacgctggcgagcgcctcggcttcggtcgcctggtggccgagcaggctgtcgagcagcttcgacacgtcgagcgtatcgccctcgccggccttatagtcggtgatgacgtcggccatcttgacatccgacagcgcgccggcatcgagcacgaaggtatcggcgcccgcgccacccgtcatggtcaccatgccgccggcgcccgacagcgtgtcgttgccgtcaccgccgaccagcgaataggcatggctatcgttgccggtggtgctgctgccgccgagcgtcgtgtcgaaggcgacttcgaggaactggccggtggaaccgtccgtcagcgtgtagctgccttccgccaggaccgactgaccgttgatcgcgccgtccaatgcctgggcatcgagcgacaggctggcgatctgatgatcggcgaggctcgaaagctcgccggcatcgctgatgccattgtggttcaggtcctgccagatggagagcttcgcgaaggcctcgtcattggcatcgatcttgccatcctggttgctgtcgagcgtcgccagcgcctgcaggccatcggcatagctgccaccggcgaacttcggcgagaagatctcggtgccattttcgatcttgccgtttccatcgacatcataggccaggataccatcggtgcccgccgtccaggcgatcttgtcctgaatgccatcggcgttgatgtcgaaagagacaccattgtcgagggtggtcagcgcgacgccgttgcgatcgaggtcgaggatgatcgggtcgatggcgttctgtgtccacgccgcctgggcgatcgcatggtccgcgccaccgaagtagacgttgacggaggcaacgccgccggccgcggcacccagcagcttgtaggcttcgacatagctgtctccgccgccattctgatcgatccgcacgctcagatcgttgccgacgacgacgaccttgacgtagcccgccagcgactgaacgttgccaagcaggctcgaaacatcgatccgctcgttggtcgcgtagtccctgatcgtatcggcattgcccgaggtcaacagctccgatccccacttataggtatcgtttccggcaccgccgaagaggatgtcgttgcccgcaccgccgacaagcgtgtcggcgcccttcgagccgatgaggatgtcgtttccgccgaggccgttcatttcaataccgccatcggcggcgtagtgcgtggtcgtaaccgtcggtgcggcctgatcagtcggcagatggccgacctgcgtcgtcgcgatagcgccggtcgtatcgctggacgtggatgtcgcggtgatcgtcgccgcgaaatccgtctttatcgtgaatgtgtggcttgtgacactgtagctcgcgtcaacaccagcaacattattgagggtcttgaccagttcctttgcagcgttgtcgaagttcgtgtcgctgtttccgccctgcgcaccagattgtgcgtaaggaacaccgttgattgtgatggtgatattttcaccggggccgcggaaagaattgtcgaggtaggtatcgaacgaaaccgttttgatccatttatcgcccgcgccattatcgaccgcagcggtaatcgcaaaagccttggcggcaccggcatcgccggagagcgtgaccgaattattggtcagattgtccgcccaggtgacgcctacggctgaaaggctgccagcaagcgtggtgcccccgaccttgaccgccttaagcccatcatagacctgctccgccgtctggcctccagcggccaccgtgtagctgtaggtcgttccgttgacggtgaccgataccttgtcaccggcatcgtaaccttcggaagcgaaggtcagcgtcgtgacctgcccgctgccggaagcaacctgcgaggtgttgactgccggcgcggcctggtccgtcggcgaggttcccagtgtcaccaccgtgctggagacgaccgaaccggcgtttccattgatgacgatgcgaccactgacggcggcgctgtccgtcgtcgtgatgtcaaaggcatccgtgccggtgtccaggttgaccttgaagccggcggctgtcaggacctgggccagcttttcttgcgcactatcgaaacgccgtgagctcgacgagccatcgttgaagccgctgctcgaatactcggtgccgttgatcgtgatcttgacgacatcgttgttgtcaaagttgttcgggctgctgaagtcgactcgatatgtccagggcttgccgacgtcggaaccgttgtcgaccgccgtggcgatatcgaaggcgttgttcacaccgggggcgctcgtgagcgtgacggtattgctgccatccagatctttcgcccaggtgacaccttcggccgcgaggctgctcgccaaggttacgccaccgacactgactgccttaagcccatcatagacctgctccgccgtctggccaccggcggcgaccgtgtagctgtaggtcttgccgttgacggtgaccgataccttgtcaccagcgtcatagctagcggcgaaggtcagcgtggtgatctgaggcgcaacgacgggggcagcgatcaggatatcggcgttgccggtgccatcgaggcttcctgtcgtgtcctgcgtgaccgacacggagcccgtcccagtcgtgcttccgtccgaaacggtgtagttgaagtttccgccgcttggaacgccatccgttacggtcaccgagcccgggtttggaagcaaactcgtcgtcatgctgctgttggatgtggtcgccgtgacatcaagcgtggagctgtcgacgtcccggtcgttggccagcagcgcccattctggaacgatgaaggttccacccgttccggcattggtgatgatgctgtcggcaccggccacgggagcgtcgttgaccgccacgacggcaactgtcgcggtgaccgtgttggagtttgccaggccgtcgttgaccgtgatctcgaacgtgcggttcgagacgtcgggatcttccgacgtgttggcgaagcggatggctgcgatggcggcttcgtaggcgccgcgggatgcattgccggcaaaggcaatggtgtcgccggtaatggtgaaggagatggtgccgatataaccgctggaaccgctcttgccgttgaccgacagaacgtcgcccgccttccaattggtcaggacgaccttggcagcctgcatgttcgcatcgctatcggcgatggaggcgttcatcgtgatcgcggtctccgcaccaccttcggtgaaggtgggcgtcgtcgagtaggagaccttgacgttgtcgatgtagaccttgtcatctccgtccaaattgtcattcgccaggaagcggatggtggtgttgggcgagatatagccttcaaggtcgagggtcatggtcgtgtagccggaatccgacgtgccgtaatggtcggttcccttgatcgtctcgagatccacccacttgttgccgtccagaacctggaccttgatgtaattgtcgctctcgaaatcggcgcgacgataatcgaaggtcagcgtcgcctttgtcgccccggtgagatcgacactacgctgcgcggcatcgccgttgtcgatgtcaacgccatcggtgagcaccatggcgtagccattgccaatgctgacaaccttgatgtcgccgtccttggggttcgtcggctcgccggtttccgtccagccggtcttccagttggccgtgccgtcgttgccgttgtagccctgctgattgaactggtcgagaacataggcgtcgttcgacaaagtgagcaccggtgcgacgttgtcgtcggcgccgttgatcgtgaaggtcacctgctgcgtcgtaccgtcaacggactggatcgcgaaggtttcgagcttcgactgtccgctgttcaggtactgaacggcggcgttggaaaccgagtaggtataggtgccatcggagccgagcgtcagggtgccgagattctggccgacgtcggtcaccgtggtcttgaacgcgccctgtcccgcatcggcatcgctgatggcgatctggccggtggccgtaaggttgccgcccgttgtgacattctggtcctcagtcaccgaggaggttccgagcgggccgatgacagccgcatcattggtgccggtaaccgtgatcgtcacgacgtgggaggctgatccgtccttggaccaaacagtgaagtcctccgtcttgtgttcgttggcggcaagcgattgcagcttgctgttgtcggcgacgtagctccaggtaccgtcagtgccgatggagaacttgccgtaagtgccggcgctgtcggtctgcgccgcgaacgcctgctggccgttatcgagatcgacgatatcgagcttgccgccggcgaacttgtcgctctcttcggtcaccgagagatcggccccggaggccgccgtgatcacggcgacatcattcgtgccggtgatcgtgacggtcacgtccttgctgatcacgccgccctggccgtcgctaatcgagaccgtgtaggtctcggtgcgggtctcgccttcggcaagcgcatgcgcggcgctgttcagcgtgtaggtccagccgacgctgccgcccgccgtcgtggcggattcgctgacggcgccgggcgtgaaggtgccaagcgtcgcaccctgaggaccggtgacgctcaccgtgtgggtgtcgatcaggtcggcgtcggtgaagttgatcgtgcccgttgccgtggcgttcgtgtcttcggtgacctcggtcgcgacgtttccgacgatatcgaagacaggcgtgtcgttggtcccgacgagattgacggtgatctcgcgcgtcgtcgacgtgccatggccgtcatcgacggtgacgcggaagacttccgtgcgtgtctcgcccgctgcgagctggttcagcgtcgcgtcgttgacgcggtacttccagtcgacccagccgacaccgtcgttgacggtctcttcgctgacaacggccgccaaggtgccgaaatagttgctacccatcggggtgaccgtcaccgagtgcttgtcgccctggtcgtcgtagatgtagaagccgccgccattgggaccggcatagcccttgggcgcgtcgaactccgtgcggtcggtcgtcgaaccggagcgggcgtcggtctcctgatactcggtgatcgttcccttctccgggaagccttcggagctcctgatggcgtcgttcttgccggtgacggtcagctggtagacggcggacttgctgtcgccgtcaccatcggtgacgctgaacggaacggtgatcgtcgcgacttcgccctcgctcagaccatcgaacttgtagccggggttgatcgtgaagacgccggtcgcgctgtcgtatttataggcggacgggtcgagggtgatcgtcgtgcccgagggggtcgagatcgtgacatgcgacgcgtcgaagctgacgctgcccttcgtgtcggcgccgaaggagaagtccttgccttccgacaggttgaacgtgaccacgccgctgtcttcgacggccgtaccggtgaagacgggaacggccgcgccgtgcgtcaggctgatattggcgagataggtgccggtgttgtcgttggcattgccaacttccttgaaggtcagcgtgttgttgccgctgcccgcgatcacatcgagggtgacggtcttcatcgcgccggtcaccgggatggtgtagacctcgttgttccagcgaacctcaagcgacgacgagttcggatcgtaggagccgacttcgaagctgatcgtgtacttgtcgccagccgtgaggccggcaacgttctgcgagatcgcgatgttgcccggcgaggcgccgaggtcgaccatcggatggccgttggacgaagcgagaccgaaataagttccgacgatcttttccagctgcacgccggtctggccgggagcggtgccctcgatcttccagccggtcgattccgtcgcccatgcgccccagcttgcggtattcgcccaggtgccgccggtgaaatcaccgttggacaggaggttcacgttctgggccgtgccgttgatggtcgggccgccatcgttgatgtcgatctggacgctgccgttggcggtgtcgccatcggcgtcggtcacggtgtagacgatcttcatgcgaaggccgtcggcggcaccggtgttggcgccatcgggatggtcgatcgggccgaactgcgtgaacttgtaggcgcccgtcgccgcgttggtgacttcgatcttgaagatcggcgtgccgtcggcgagcttgccgacgagggtcagcgcgtcgagctgctggatctggatcggcttgtcaccggaggtcagcgcgacagtcgtgaacttggtctcgttggcatcggagatgactggggccgccggagcgccgctcaggccgtaggcgatcgcggtgatcttcgcgccgtccgcgccggcgtggaagctcatcgtgccggtggcggaggtctccttgaaggaaccgtcggtgttgacggcttcctggacggtgacgcgtccggcgtaacccgccgtcggctggtcgtcacggatgtctacctgcacggcgtcggtcgccgtgtcaccatccttgtcggtgacgacgaagtcgaagaccatgcgcagcgaatcggcggcgccggcctcgcccttgtccggatgatcgatcgggccggactgggtgaaggtgtaggcgcccgtcttggcgtcggtgacctgcagcgagaagatctcgacattgccgaccttgccgatgaccgtcaggccgtcggtggaggtggtgaccgtgatcggctggccgttcgaggtgaaggccgggaaggtgatctttccgtccgacgtctccggcatttccatgatcgcattgccgaagcggtaggcaatgccggtgacctgggcgccatcggcgccgccgtcgaagagcagcttgccgtttacgctctgctggatgaactggccgttgtcggtgccggcttccgtcacggtgacggtgctggagaagtaggccttcgggccatcgtcattgacggcgatctgcaggctgctggtcgacgtatcgccatcgccatcggtgacggtgaagccgatcttcagcacgatgccgtccttgccgccggtttcgttcttgtccggctggtcgaaaggcagggactgcgtgaacttgtattcaccggtcgccgcgttggtgacctgaaccacgaagacggtcaggccgtcggcgcgaacgccggtcaaggtcaggtgatcgttggattcgacgatacgaaccgcctggccgccggatgtcatcgccttcgccgtaaaggagtcggcatcttcgtccgcgaccgtgggggccgcgttggtgccgagcccgtaggcgatcgcggtcaccttggcgccatcggcgccggcaacgaacttcatggtgccggtggcagaggtttcgtggaaggagccgtcggtgttggccgtttcctgaaccgtgatgcggccggaatagctggccgtcggaacgtcgtccttgatggtgacgtcgaatttgccggtgatggcgtcgccgtccccgtcggtcgcggtgtaggtcacggcgatcttcagattttcggcgctggcgccggtatgagccgtgttgctcatgagcgtgaaggtgtacttgccgtcgttgccgagcgtgaccttccaggagctgtcatcggccgtcagggtcttgctcgcatcgtcccacttggcgccgtcggccgccagaacgaccttgccgccatccgcgccgagcgagatgtcgaggtcgcccttgacggagagatgggcgctgtcgggcgacgagccgttggcgagatcgtcctcgctgaggctgacgctgctgacggacttcagaaccggcgcatcgtcgcggaactggatctgcttgccgatgtcgatcaacttggtggccgtgtcgccatcgtaatcggtggcggtgacgacggcggaaaccttgcccttcagatcgaccagatcgttggcgttgccgccatcggcgtgcttgatcgcctggtactgggcgacgctgacgcggcccccgctgtcgaggctgatcgcgaagacggccttgttgtcgctgtcgcggccgatgacgagaccattgctcatcgaaagcgtgatcgccttgccgtcggccgtgaacaggccggagtccgagctcgtgatgctgagggtccgcgagaccttgccctgtccatcggtgccgatgctggagccgtagtcgacgatcgcacccgcgtcgcgggcatagccgagcgcggtgatgcccgaattaccgttctcgaacgcggagaagatcgacttcacggtctgcgacgtcgtgtcgtcgctgccgaggttgtcgttggcgctttcgtcatgggtgacgatgcggccggtcagcgagatcgagaccgtggggacgtcgtcggtgatcttgacgacgagcttgccggccaggttgatgctgtcgccgtcgccatcggtggccttgatgaccgagccgaagtcgatgccggcgaccgtgccgttgccggccttcaggtcggagttggcgccattgccggcggcgtggtcgagctggtcgtactgctggaacttgaagctgccgtcggcattcagcgtcagcgacagaaccgggcggtcgaacagcgcgtcgtagccctgacccaggacgttgacgtaaccgatgaccgtgttgccgaccacggcgtaggagagctggctgccctgcgacgacaggccgagagccgtcagtgtcgcggctgcattgtcggtcaacgagaaggcgccattcttggcggcaccatcggcgccgaaggacacggtcgatgcgatcgaaccggagaccgtggcggcaaggccgaggccaagcaccgacaagtccgacgacgagccgtcggccgtgccgtcactggggctgttgccctgcgacaggacgttgaagatatcgccttcgtcggcggtgacactgacggacgaaccggaaaggacaggcgcgtcgtcgcggaactggatctggccgccgatatcgatcgacttggtggccgtgtcgccatcatagtcggtggcgctgaccacggccgaaatcttgccggcgaggctgaccaggtcgttggcattgccgccatcgggatgcttgatcgcctgatactgggcaacgctgacgcggccgtcgctgtcgaggctgatcgcgaagaccgccttgccatagctgtcgctgccgatgacgagaccattgctcatcgagagcgtgatcgctttgccgtcgttcgtgaacaggccggagttcgagctggtgatgtcgagggtgagcgagaccttgccctgcccatcggcgccaatgctggagccgtagtcgacgatcgcacccgcttcacgggcatagccgagcgcggtgatgttcttgccgttctcgaaagtggagaagatcaaccggacgtcgcgcgacgtcgtatcgtcgctgttcgagtccctgcccgctgtctcgtcatgcgtcacgatgcggccggtcagcgagatcgagacggtggggacgtcgtcggtgatcttgacgacgagcttgtcggtcaaggtaacgctgtcgccgtcaccgtcggtggccttgatgaccgcgccgaagtcgatgccggagaccgtgccgttgccggccttcaggtcggtgttggcgccattgccggcggcgtggtcgagctggtcgtactgctggtacttgaagctgccgtcgctgttcagcgtgaacgacaggaccgggcggtcgacgagcgggttgtagccctgacccaggacgttgacgtagccgatgaccgtgttgccgaccacggcgtaggagagctggtggccctgcgacgacaggccgagagccgtcagtgtcgcggctgcattgtcggtaaacgagaaggcgccactcttggcggcaccgtcggcgccgaaggagaccgttgcggcaaccgagccggagacagtggcggcgaggccgaggccgagcgccgaccaatcggacgacgagccgtcggccgtgccgtcactagggctgttgccctgcgacaggacgttgaagatatcgccttcgtcggcggtgacactgacggacgaaccggagagaaccggcgcatcgtcgcggaactggatctggccgccgatatcgatcgacttggtggccgtgtcgccatcgtagtcggtggcgctgaccacggccgagatcttgccagcgaggctgaccagatcgttggcgttgccgccatcggcgtgctggatcgcctgatactgggcaacgctgacgcggccctcgctgtcgaggctgatcgcgaagaccggcttgccgtggctgtcgctgccgatcacgaggccgttgttcatcgagagcgtgatcgcttcaccgtcggtcgtgaacaggccggagttcgagctggtgatgctgagggtgagcgagaccttgctcggctcgtcggcgccgacgctggagccgtagtcgacgatcgcacccgcgtcacgagcatagccaagcgcggtgatgttcttgttgtgctcgaaagcagagaagatcgaccggacgtcgcgcgacgtcgtgtcgtcgctgttcgagtccctgccggctgtctcgtcatgggtgacgctgcggccggtgagcgagatcgagaccgtggggacgtcgtcggtgatcttgacgacgagcttgccgccgatcacgacgctgtcgccatcgccgtcggtcgccttgatgaccgagccgaagtcgatgccggcaagcgggcccgacgcggtcttcagatcggtgttggcgccgttgccggcgacgtggtcgagctggtcgtactgctggtacttgaagctgccgtcgctgttcagcgtgaaggacaggaccggacggtcgacgagcgggttgtaaccctgacccaggacgttgacgtagccgatgatcgtgttgccgaccacggcgtaggagagctggtgaccctgcgacgacaggccgaggcccgtgagcgtgcttgcggcattggccgtgaacgagaagccgccagtggcagcggagccatccgcgccaaaggagaccgtagcggcaaccgagccggaaaccgtggcgccgtagttgtggcgagacacccactcggtggacgagccgtcggcggtgccatcgaacggcgaattgccctgcgacagcgaggtcgcgatgtcgccttcgtcggcggtcacggcaacgaccgttcccgtggtgacgggcacgtcgtcattgacgttgatggtcagcgaaccgttggcggtgtcgccgtcgccgtccttgacctggaagccgatggtgacaggcaggttgtcttccgtcgcacccttggtggcatgcaccagcggagcggacaggtcgaaggtgtagctgccgtctgccttgaccgtcagcgtgaacacgacgtcgccgctgtccttgccggtcgccgtcaggatggtcaaaccgcccttttccgtcgtggtggtgtagaccagcgcttcggcaacgccattgccgttgacgtcgcgtatcgcctgaatgcccgtcggcgccgtgaaggacacggactggacgccatcggcgccggccttgaagagggtgccggcttcgccggagaccgacttggcgtcggcaacgtcacccttgccgccttcattgccggggaagagcgtctgcgcgtcgtcgtcgagtttggtcgcgacagtcacggtgcttgccgtgggggcgtcatcgttgatggtgacatcgagccagcctctcgacgtgtcgccatcgccgtcggtgacgatgaagttgaccgtcaggccgaaattgtcctggccgctgccgctgtggacgatcggcgcgttggcggtgaactcataagagccatcggcgtgaacgacaaaggtcgcgacggtctgcaggctgtctttgccgatcgccgtgaaggtggtttcaccgccgttgacaacgccctcgctccagctgacgctttccttgctggcgaagccgtacgcatccttgtagatggccgagaagctcatctgttcgccgccgaggacgatgctcttgaagccgtccgcccccgtcgtgaacagcgcaccggcgccgccgctgacgcttgtcacgccaacattgctgttgcccgggaagatcgtctgcaggtcgtcctgcatgggggtctcgttggtgacttcattggcatccggcacgtcgtcgttgatggtgacggtgaagtcggccggcgtggtgtcgccgtcggcgtccttggcggtgatggcgaatgtcaggtcgatctgcttgtcttgcgacggcgcaacttcgagcggcatcatctcgccgccggggcccgaccgcggatgatcgatgctggtcagaagctggaagctgtaggcgccgttcgcggcggtcggatcgagcgtcaccacgaagacgtcggtggtcttgaccacggcctccgagccttcgccgataacggtctcggtgtagccggtcagcgtgtggccatcggcggagattctatagagaatgtcctggccctgcgactgcaggccctccggcgcgctctgcgcgtcgaatgtcaggtcgcggccgctgccattgtcggcgccccactgcacgccgagcgagatgctgccggtgacagccgggctttcggcgccgcgcaggccgccttcgctgacgacgctgtcgtcgctctcgcccttgaggtcgatcaccggcgcgtcatcgcggatgtccaccgaggcgatgccggtgacctggtcgttgttcttgtcggtgacggtgtagctgaactgcaggcgcagcacgtcgtcggcgcccgtctggccccggtcgggatgatcgagcgggccgaactgcgtgaaggtgtaggcgccggtctgaatgttggtgaccgtcagcgtgaagaccggctggccgtcgaccgtgccggtgatggtcaggccgttgacggtcacggtgaccgcctggccgttggaggtcagcgcgacggaggtgccgctctgcgtgccttcctgcatgtcgagcgaatcggagaggccgacggcggtgatgacgccgaggtccttgccggggatgaagccgaactggccgttgacgacctgggtggcgaaaccgccattgccgtcgcttgcttccgtgatcagcgagatgctgcttgccgtgaggagcggaacgccgttctgcagatccggcgtgcggcccggcgtcgcatcgggctgctgcgtgtcggcgagcagcgaggcgagctgcgtcggatcgccgaagttgccctggaccgagtcctggaagttggcgccggagctcgaaggcgaggagctcgcggaataggagccgtcggggccggcggcgacgttgatgttgctctgctcgagcgccgcgatgacggcctgctgcggcagctcgacttcaccgagcaggaaggtcgggacgttcaccgcgccgttgacgatgacgatctcggtgccatcggcctggacgaggatgagatcgttgccgcggacgcggatgtcgtcgatcgcggtgccttccggcaggcgggcgatgttgttctgatccggtacaatctggccggcgggcgcggctgccgtcgcttcttgagcggcgggcaagcggtcggtcgtttcagtcgactggggcgcctgctggtcgatcggcggagtgctttgagcctgcgcgacctcgacgccgccacgggcggaagtgcgcaggagagcgtcctgctgaatatcggagatcaagtcatgcgatgcggtttcattgtcaacggcagagatgcgagaatcttcgatagacatacaaaataccccaatgagaaactgaggccaaataattccgccgaagatacaaaagcaatactgcccgataggcgccgatatagccggttatgcatccacccagaaatgtttaggaacggttaaccgcaaaagcctttagccggtaaaattataataaaaatagaacgatagaggctatttcgccacagcgagacggccccgttgccggggccgattcgtggtcgttccagatgcttgatcggggtccgccggtcgctcagcgggccggcgcgacaaggcagaagaaggcgccctgcgggtcgatcgcctgcaccacccagctgccgccgggcacctccatcgggccgttgacgacctggccgctgccggccttgacccgctcgatggcggcatcgatggcgggaacgttgaagtaatagacccaggccggcatcggcacattctcaggcttcgtcatcatgccgccgacaggtgtcccgtgctcggcgaagatgcggtagacgcccatcgggcccatgtcgaaatcgtggtccctggtccagccgaagagcttctcgtagaaggtgaaggcctgactgccatcgccggcatagagttcgctccagccgagcgtgccgggcgcgcccatcgccgcttcgggcggcgggctgtccatcggcgccggggtcatgatgcagatgacggcgccatgcgggtcggcgaccacggcgaagcggccgatttccggaatatcctccggcgggcggcggaccgagccgccattggcggcgaaatcgcgggcgctctgatcgacatcgtcgaccgcgacatagccggtccagttcggcgggacgccggtgccttcgagctcggcgggaaacaccatcatgccggcgcggcccacgccatctgcctcgaagatggtatagggcggctggccgggcacggtcatttcgctggtcgtccagccgacgacctttgtgtagaaatccctggcgcccttggtatcgggcgtcatcaactcgcaccagatgaacttgccgtgggtctccgacatcgtgatctcccttcacgttcttcgttgcgtcgatatgggtgctgattatctcagtcgatgatctcagccgtcagtggcagcaggatgacgtcttgggcgcgtcggcatactcgtcgtggcgcttgacgaagttcatcgtcgaatcctcgttgcggcctttcggcgcgcggtcgaggatcatcagcgtgccgatcagctcttccggaccacgggcgtagctggagtatgtgtggaagatctcgcccttgtcgttcctgtaaaaggcgctcaatcctggtagttcgtcattggcttcttcgggcgggatcgaagtaaagttgtagaataccttgtccccgccgagatcttccgggctgaaggagacgtgatagtcgaagttgaagtcgctcgatgccgaggatacccatgggaatttccagcccatcctgttcttgtaggcctcgatcttggcgacgggggcgcgcgaaacggcgacccaggtgacatcgtgattgttcagatgcggcaacgccccatcgacatggtcggagaggaaggagcagccggggcagccggcctcccaatcgggaccgagcatgaaatgatagacgatcaactggctgcggccatcgaagagatcgctaagcgacctccggccatcgggcgtgtcgaaaacgtaatccttctcgaccctgacccagggaagcgccatgcgctcggcattgaccctgtccctcagatgcgttgcttccttctccttgagaagcagcgcgcggcgggcttcgagccattcttcacgggaaacgacttggttctgcatcgtgtgcgccctcctccggcgcgaccgagacggtccattctccttttccttgactagatatattgatatcaatagaaattagacatgtcaaacgctaccgagattcctttcgcgacgacgcttctggtgcgcgacacgtgcctgtgcctgcacgcgcagcgggccgcgcgggccctggcgcggcttttcgacgatgcgctcaggccggcggggctgaccaatgggcagttctcgctgctgatgtcgctgaaccggccggagccgccgccgatggggccggtcgccagactgctcgccatggaccagacgacgctgacggcggcgctgaagccgttgcagcggcgcggctgggtcgaggtcatcaccaatccgaaggacaagcgcgcgcggctgctgcgcctcacgcccgagggcatgggcgtgcttgtggcggcgctgccgatctgggaaagcacgcatgcggcgctggaaaagaacctgcccgagggcaatgccgagcggttgcggcaggatctgcaggccctggcctagtcaggctccttgagcgatgcgtgggtcgcttccgaaatcggcgcggctaaagcctatcctggctttcggaaattcgcacagcgcctggacgcccgtcgcggacaggcgcaggcgccatgtctggcgctcgacgggatcgcgcgcggcaaaggccgaggcggtgagcagcgcgatattgcggcgatggccgggatcgcgcaccgaggcgtagaggatcgcctggcaaccggcctcgcgcgcggcatctgccagcgtctggcagggctcgtagtgctggggatcgctccatatcgcatgatcgcgatcgagcggcggcgtggtgaggtcgatcgcgcgcggcgtctcgatggctgccgcgaacgcggtgtattcggcggcgttggcgggaagcggcgtatcaggggaatcggcaaagaacagcagccggtagaaggccatctccgatatcgcggtctcgaccgcttccgacgcatagtagacgccgagggtccgccccgcccggcggaagcgcgaaccgtgcgggtagacggcgccgtagcggaagggcgtcgccaagaggtaatcgagccccctgcactccggcggcaggaccggcttgctttcttccagcagcgtttcgagcaaggcctgctcttccagcgtgtcgacgatcttcaaggtcgagatctgatgctgcgcctccaccagccgccagaagcggccggaaacgggtcgcgcttcagacgatagcgcggcgggcgtccagataggcgaggacatcggtcaatcccggtatggtgacgatcttttcgagcggggtggcgccgagcgctgtgttggcgttgcgcagccacgcacgcgcgacggcttcatcgccgccgacgatggcgtccagcgagcggaacaggcgcaccagcaggatggcaagttcgaaggatttggagccgcgctccagcaggtagtcctgccgcttcatgcgcgataccgtggcttccgacaggccaagcacggaagacagcgtgcgggcgctgatgccgagccgctcggcggcggcgacggccgccttggtgatgacgacggcttccgaggggtgcgtacccgatagcggatgggcgatggccatggcagcgatcctttccttggaaataatatagcgactttatttcttatggaaagatggctaacgaaaattcctctttcatggaaacaacccggcctgccatgcagaccgggttgccatagtcgtgacgatcgaagcttacttcgccgacgggtccttgatggtcttgccgatcgagaaggcaagcagcgccgagatcagcatcaggccaccgacgatgaacatcggcatctcgtagagaccggtggcatccttgacggcaccggtgatgtagggcgcggcgaagccggcaagattgcccacggtgttgatgagcgcgatgccggcggcagccgcggcacccgtcaggaagcgcgacgggaaggaccagaagttcggcagcgcggagaagatcgcgcaggcggtcagcgtgatcgcgatgaccgttgcctcgggcgacgacatcagcagggcgagcgggatgctgatcgcgccgaccagggccgggatgccgacgtgccaggcgcggacgccacgcttggacgcatcacggctccagaagaacagcgcgatggcggccggcaggtacgggatcgccgtgatcaggcccttgtcgaagacgttgaacttggtgccgaacttggtctcgaagcccgcgatgatcgtcggcaggaagaaggccagtgcgtagagaccatagatcaggccgaagtagatgaacgacagcagccagacgcgcttgtccttcagcgcctgcatggtcattgagccatggccggaaagcttgcctgcttcttccttggcgagttcccggttcagccagtcacgctcgttcggcgtcagccacttggcggcggtcggcgtatcgggcaggtagaaccaggtgatgatgccgacgacgacggccggtacggacacgccgaggaacatgatgcgccagccttcgtaaccgaacaggccatgtgcctggatcagcagcgaggcgatcggcgcgccgatgaccgtggtcagcggctgggccagatagaagagcgccaggatcttggcgcggtggcggccgggaacccaggtgctgagatagaggatggcgccggggaagaagccggcttcggcgatgccgagcaggaagcgcagcgtatacaggccattgatgctgctcacccaggtgaagagcatcgagacgacgccccaggtcaccatgatgcgcgagagccagcggcgcgcgccatatttatggagcgcaagattgctgggaatttccagaatgatgtagccgaagaagaagatgccagcggcaaagccgaactgggcggcggtcatgccgaggtcctgcgtcatcccgttcgggccggcaaaggaaattgccgtgcgatcgaggaagttgatgaagaacatcaaggcaatgaagggcaccagacgaatggagatcttgcggatcgccgatttttcgacctgctgttcctgttctgatagatttaacgtcgcgttcacatagtcctcccgacaagaccgctgcggcctgtctcggtccacgcgtgcgacttgttctatgcagccccgctctgtcgggaatgctggatgttgatctctagcccaactccgaaaggcggcctctcatgtccgacaagctgttcgcgccttgctgcacgagcgccccgacggacatgcctcctcccctagcgagccacacgcttctttcaaattcaccaccagtcgtcaactggtatgatgagatagtgagcactctttaacagaatcttagaacatgcctcaaacccggcaacgctgaatcgcgtcgtgaaaacagcaaaacgcgccgtcctcggcgagaacggcgcgttttttcgacaggttcatccggccttgtcaggcgacggtgaccggcacttccgtcgaggtgcgcatggcgtggctataggggcagacgatgtgagcggcggcggccagcttttcggcggtcggcttgtcgagacccggaatatgaacggtcagcgccacttcgatgccgaagccgccgccatcttcacgcgggccgatgccgaccgtggccgatacggtcgtgtcctcgggaatcttgaccttctgctggcccgcgacaaatttcagggcaccgaggaagcaggccgagtagcctgccgcgaagagctgttccgggttggtgccggtggcgccgtcgccgccaagttccttcggaaccgtcagcgttacatcgagaacgccgttttcggaaacggcgcggcccgcgcggccaccggtggcggaagctttggtcgtgtagaggatcggcatgtgagtctccttcgttggggttggattttgtatatcgcgcaattaaattgtacgcaagtgaattttgcaaattgcattcgaaatccgaaaggacgacaatgcggtatcggggaaagacgatgacgaaagcgcagacgagcaagacgacgacaaagacgatgacaattccggaagaggaaaagcggctggaacgacagctttgcttcgcggtctattcgacggcgcacgcgtttacgcgcgcctacaagccgatcctcgacaaggtcggcctgacctatccgcaatatctcgtcatgctggttctatgggagcgaacggcactgccggtgaagacgatcggcgagcagctcgatctcgattccggcacgctgtcgccgctcttgaagcgcctcgagcagagcggcctgatcgtgcgcacgcgcgatcccagagacgagcgacaggtgatcgtgtcgctgaccgccgagggcgacgcgatgcgcggcgaggtcgacacgatcatgacctcgatcggccagtcgatcggctgtacattggaggagatggccgatatccgcgagaagctgcagggcctgcgcggcaacctgaccgagacacgctgaccccgccgaccgccgtacgggtagagtttgacgcggccgtcgatcttcacatggggatatagagggatggcgcccgaatacgacgggcttgcgccctgggcgcggaacgtccctccccgcgacggggagagacgaggatttcaatcctactgcttgacgacgaccggcgccttgttcggcacgcgatcgtagaggtcgatgacatcctggttcagcaggcggacgcagcccgacgatacggccttgccgatcgagcgccagtccggattgccgtgcaggcggtacagcgtgtcctcgccgcccgagaagatgtagagcgcgcgggcgccgagcgggttcttcagcccgccctccatgccgccgttctcgatcgaatacttgacgagttccggctggcgggcgaccatctcattcggtggcttccagcgcggccacttctgacgccactggatgacgccggtgccctgccacgcgaaaccttcgcggccgatgccgacgccgtagcgcatcgcggtaccacccggctgcaccagatagagcaggcgcgagggcgtatcgacgacgatcgtgccgggacgctcgccggtggggtcgatgacctgctggcgatagaagcgcggatcgatctgctggtacgggaccgccgggatcaggaaaccgccgtcctcgaccgggccgtacatgacggcgagctcggcatccgtcggcgccggcgtggtctggaaagcacggatggggttcgggaacgacactggctgacccgccatcgggctggtgcccgacgtggaggcacatcctgccagcgtcgatgccgcggttaccgctgaaagcgatagaaatgtgcggcgggatattgttttttcaaagctcataacgcgggtctgttttcctttagcgcggagacgacgaacgccgtctcctggggggcttcaacgctggttacagttgaggaacctatctcgttatgccgaataaaccagaacctcacgaagacgtgtggctgctcgaggcgacgttctcatgccgcctgttgcgcggctacatcaccacgatctccgccttggccggaacgcgctcgtaaaggtccatcacatcctggttcatcatgcgcacgcagcccgacgacacggccttgccgatcgactgccagtcgggcgttccgtggacgcggtagagcgtatcctcgccattcttgaagatgtagagagcccgcgcgccgagcggatttccaagacctggattcatgcctccattggcggccgagaaggcgcggacttcgggctggcgcttgaccatgtcgtcgggcggcgtccagcgcggccacttctgcttccactggatgacgccgcggccggaccaggcatagccatcgcgtccgagcccgacgccatagcgaatggccttgccgcccgcctggatcaggtagagatgcttggtcctggtgtcgacgatgatggtgccgggcttttcgctggaggggtaattgacctcctggcgcatatattcgggatcgacgcggctgatcgggatggccggcagggtgaaatcattgtccctgacctccccgtacatcgcggcactgacgggattgaccaccggcatgccgtaggtccgcatctgggtcgcgccagggatgccataggtctggttgtagatcgtcgccggaacgccgggccgctgcgggatcggcgcgttgaccgggcggacacgatcgggatcgatgcccggcggcttgtagaagacgggataggtttcctggacgaaacgggccggatcggtcgcgccggtatcgggaatgagaatgttgcagccggaaagcgacagggccgccaacacgagccccgacatggccgacaaccggcttagaccattcatgaaaccaccctcatcgataacagcgacatttacagctgtcgcgaggatggcatgcgcggctggcgcgaagctggcgacgacggccggccaccgccccggagcgatcgaccgttaagccgccacgccgcggaagaagcggatgctctgctcgatttcctcggggagcgccgacgtgtgtccgcccttgaccgtatccgtctcgatgcgaagtccggcggcgcgcgcgcggctggcgagcaggccggcgcggtcgttgaaatgcgattcgtcggtgccgtggacgacacgcaccgggcacttgaagctctgggcgtagcacagcgccgtgcgcacctcgaactcgcgggtgttgtcgtcgtcgaagcggatatcctgcggatagcggttgaagaagcggaatgcgtcgggattgcccgagatcggggccgccgcgcggaacttgtgggtcgacatcgaggtcagcatggtgagcgtgccgccgatgctgtggccggcgatgaaaagcctgtcggcgtcgacacccggcagatgcgccaggcggtcggccgccgagagcacatcgtccacctcgtcgtagaagccggagaaattgcccgcctggccgttttcgccgcgcagcgacggcatcagcaccacgaagccggcgtcgatatagggtcccatcaggttccagtggccgacccccatcgcgttgccgccatgcaggaagagaatgccgggcttggacttgcgctcgcgcttgtacttcgaaacccatgccgccagctccagctcgccgccatagccggagcgatagaagatcttgtcggcgttagcgggcgcgtcgagcggctcatacgtgtcgggcgccgggcccttctcgagcagccgggtgcggaaacgcttgcgcaccttggcgtaatcgcgggtgatcaggcgcggctcggcggggacgtcgaaggcgctggcgacgcccggaagggccggaagagcaagggcgccggcgagccccttcagaagcagccggcgctggcgcgaaaaggaatggtcgtcgtctgtcatctcgttcttccgtcttccccggcaattcaaatgcttgcacccttggcgcgccgacgccaagacacattgtcttgaggatgcacagtcggatgtattttgcatcaggaaaatgcgagatgggcgggattggcggttggctagggccggcgattgcggaaaagctgagaaagcgcaccaattcttttgagaataattcacggggcgcatcctagggtagatagcaccacaggagcgtatccatgatctttgccaaactgacgtcactcaccgccgttcttctcgcacttggcacgactggcgctttcgcctcgtcgcaagataccgtcgacctcgtctcccggcagatgatgaaatgcctgaagatcccggcagacgcgccagaggcctacagcgtgaatgcggtggtagtgttgaagaatggctcggcggatgcggtttccatcaactttcgacaaatgccgtcaccctgggaacaagtcgcggcgcccatgatcgccgacgcgatcacgcggtgcgagccatatggttcgatctccgagagaatcgagctctccgtcacgcccgaactcgtcaacgcaggagcaggccgctaggcggcatttgaaatctgacgcgtcccatcacaatacccgacgcaccgcgacgccttcagcaatcggcggcgcccggcgctttgcgcccatctgtaaccgccttgcccaggcgtcgttcgcggcgcttttcatcaagccgttcacgaacgtcttcgggaagctccgcgcgcagcgccgtccagtcagtgctcacggtctttctccatcaacataccgcgcccatcatcatgccgaatattatctaacgatatagctcggctcaacagagccctaccccgccttcgcatcaatcatcgccaccagtgtactcaacctgtctgcttccgccgtcggcttgtcctgtctcaggcgtgagatgcgcgggaagcgcatggcgacgcctgacttgtggcggttggagcggttgatgccttcgaaggcgacttccaccacgaagccgaaatccttgtcggcgcgcacggcgcgcaccgggccgaagcgttcggtggtgttgttgcgcacgaacttgtcgaggatttcaagctcggcgtcggtgaagccgaagtaggccttgccgacgggcaccagctgctcgccatcgggcgtttccgcccagacgccgaaggtgaaatcggaatagtagctcgagcgcttgccgtggccgcgctgcgcgtacatgagaacggcgtcgacattataggggttgcgcttccacttgaaccacggccccttcagccgcccggcctggtagacgctgtcgcggcgcttgatcatgacgccctcgatgacgggatcgggcggggtcgagcgcaggtcgtcgagttcttcccacgaggagaattgaaccagcgcggaaaggtcgaagcgctcgtgcggggcttgctcgacgatctcggccaggcgcgcgcggcgttcgagataggttttggcgcggacatcctcctcgccgtcgaagaggagatcgtaagctcttatgaaggcagggtaatcgtcctgcatcttctgcgtcacggtcttgcggttgaggcgctgctgcaggtcggagaaggtgcgggtcgggctgttcgaccgggcggtgccgccgacgagaagctcgccgtcgatgacgccgtcgaagctgatggattgggcgatatcggggaatgccgcggagatgtcgtctccggagcgggagtagatcttgcgggtttcgccggcgcgcgacagctgcacgcggatgccgtcccatttccactcggcggcatagtccgaagggtcgagctgagcgagatcgccctcctccaccgggttcgccagcatcaccgaatggaagatcgccggcgtcgcaagcaccggcttgccacccttgccctccagccaggcaaacaggctctcatagggcggctgcaggccatgccacagcgtctcgatctcggtcacgtcgggttcaccgagatcggcgagcgcctgcttggcgagcctggccgagacgccgatacgcagcgcgccggtcgcgagcttgatgaaggcgaagcggccggaggcgtcgaggcgatcgagcaggtcgcggacatagccgcgcacctcggtgcggccgagcgtgttcatctcggccaccacctcgcccagcctcggctgcgccagcgccgagcgctctatgtcgcgctcgttgtcccagaccagcgagatggtctcggcaagatcgccgacgtagtcgtaggagtagcggaaaagcacctcgtcgatgcgctccagcgccagttcgcgcagcatggcgggcttgacgttgcggacatcgagcgtgccggcgatggccgcgagaccatagccgcgatcgggatcgggcgtgtcgcggaagtaatccgccagcagcttgagcttgccgttgcgggatggcgtgaggaccaggcggtcgaggaggtcggcgaaggctttcatggcgcgcttcccgcttgtggcaaagtcccctccccaacccctccccacaagggggaggg

SEQ ID NO: 41 - DNA, 41770 bp, Rhizobium matallidurans
  source 1..41770: mol_type = genomic DNA
agccagagccaggggtttgtcagcagtctgaaccccgccgaagcggggttttatcaatctatccgatcgcttagtagcgatcgtcttcgtcttcatccggcgtcgaggacttcagcgacttcagcttcgcgaagacggcatcggcgtcgatttccttttcttcctcgcgctcgtagctcggggcgaggcgctcggtttcgtgcgcggactgcagcgtttcgccgagttccgcagcggtcggcagcggacggcccttggcggccttctcgacttccatgtcgaggtcgatctggctgcagaggccgagcgtgaccgggtccatcggcgtcaggttggcggcattccagtgagtgcggtcgcggatctgctcgatggtcgacttggtcgttccgacgagacgcgaaatctgcgcgtccttcagttcgggatgattgcgaaccagccacaggatggcgttcgggcgatcctggcgcttggagaccggcgtgtagcgtgggccgcggcgcttcgattcgggaacgcgcaccttcggctcggagagcttgagcttgtgggccgggttcttctcggcgcgttcgatttcgtcgcgcgacagctgaccggtggagatcggatccaggcccttgatgccttgcgcagcttcgccgtcggcgatcgccttcacttccagagggtgcaatttgcagaactgagcgatctggtcgaaagacagagctgtgttgtcgacgagccaaatggcggtcgccttcggcataagcagttgttgagccatggatatagtccttctgtcgtccgcgccggtgtcgcggtccgtgggttgtcaccactatgtccgggaaattatgccgctatataaccggagtgacgcataattgcaattgatcacgaatgaaatgacctttgtctaattgccgggtcgatctgacctgttatgaatgcacaaaaccgcctgtggcgtgcttctgccgccggcgtccgagtgaggaggaaatcgatgtcggagaagatctacccggtgcaaaagccggttcagagccatgcgcttatcgacaaggccaagtacgagaaatggtacgaggagagcgtcgaaaatccggataagttctggggcaagcacggcaagcggatcgactggttcaagccttatacgaaggtgaagaacacctcttttaccggcaatgtgaagatcaagtggttcgaggacggccagaccaacgtctcctacaactgtatcgacaggcacctgaagaccaacggcaaccaggtcgccatcatcttcgagggggacaacccctacatcgacaagaaaatcacctataacgagctctacgagcatgtttgccgcatggcgaacgtgttgaagaagcatggtgtcaagaagggtgaccgcgtcaccatctacatgccgatgatccccgaggccgcctatgcgatgctcgcctgcgcccgcatcggcgcggtgcactcgatcgtcttcggcggcttttcgccggaagcgctggcgggacggatcgtcgattgcgaatcaaccttcgtcatcacctgcgacgagggcgtgcgcggcggcaagccggtgccgctgaaggaaaataccgacacggcgatccatatcgcagcacgccagcatgtgatcgtcgagaaggtgcttgtggttcgccgcaccggcggcaagaccggctgggcgccgggccgcgacctctggtatcaccaggaaatggcgacggtgaagcccgagtgcccacccgccaagatgaaggcggaagatccgctcttcattctctacacgtcaggctcgaccggcaagccgaagggtgtgctgcacaccactggcggctacctcgtctacgcggcgatgacgcacgaatatgtgttcgactatcaccccggcgatatctactggtgcaccgccgatgtcggttgggtcaccggccactcgtatatcgtctatgggccgcttgcgaactgcgcgacgacgctgatgttcgaaggcgttcccaactttccggatcaggggcgtttctgggaggttatcgacaagcacaaggtgaatatcttctataccgcacccacggccatccgttcgctgatgggcgccggcgatcaattcgtgacgcgctcgtcgcggtccagcctgcgtctgctcggcacggtgggagagcccatcaatcccgaagcctgggaatggtactacaacgttgtcggtgacaagcgctgccccgtcatcgatacctggtggcagacggaaaccggcggccacatgatcacgccgctgccgggcgcgaccgacctgaagcccggatcggcgacgaagccgttcttcggcgtgaagccgcagttggtggacaatgaaggcaacgtgctggagggcgcggccgatggcaatctctgcatcaccgacagctggccggggcagatgcgcaccgtctatggcgaccatgagcgcttcatccagacctacttctcgacctacaagggcaaatacttcaccggcgacggctgccggcgggacgaggacggctattactggattaccggtcgcgtcgatgacgttctgaacgtgtccggccatcgcctcggcacggccgaggtcgaatcggcgcttgtgtcgcacagcctcgtgtccgaggcggcggtcgtcggctatccgcatgcgatcaagggtcagggcatctattgctatgtcacgctgatggccggcaacgagggttcggacgaactgcgccagcagctgatcaagcatgttcggaacgagatcggcccgatcgcggcacccgacaagatccagttttcgcccgggctgccgaagacccgatccggaaagatcatgcgccgtatcctgcgcaagatcgccgaggacgacttcggttcgctgggcgatacgtcgacgctggccgatccggctgtcgtggatgacctgatcgcaaacaggcagaacaaggcggctgcttaacagtgattgcctgccaatgagcggccgcttcgggaaaccggagcggtctcactcctcgtagggacagggtgccttctgcttccgaccgccgtcataggcaacggcaatcccctcgcccagcatatactgagccggattccgcccatcggccaacgtcacgtccgccaggatgcggccgaaatacttgtctccggaaatccgcgtcagctgcacttgcggcgaatcgccggtcagtttctccaacacctctcgcgcgtccagaccggcgcgtctgactgcggcgcatttcgagcgcatctcgggtgtatcgataccgcgaatgcggacatagacttcaacggtctgctgcggccacggacgcgccgcgaccagcaatgtgtctccatcgatcacttgcagaatttccgccgacacgggtccggctatctcgtcgcgtgcaaagcccggcatcgaagatgcagcgatgaaagctatcgtggtgatggcgcgcgtgaacataaaaggaataaattccgatattcgcgggaagtcaataggaatatttactcagaaatcgattgcgcgaccgttgatttcccagtcgccgaaccgggccggatcggcaccccctcgcccgccgatctccgtcggcatatcggtcggctgttcgttgcggcgacgctcctcggcctcggcgagcgctcgcctggctgcgggggatagcatctttcgcacaggttccgtgccttccgccgcaggcgtctcggtattgtcgttgtccgcttcttgcatgacgcatactcgtctgaaaatattgaaaatcgctgatgaacgaccaaattataggacgccggcacggcgattgaaacccttcgagcgcaaactgcgctcgcccgagatggagacgatgatgaaccttgtgcggactgccatgttgcttgccttcatgacggcgctgttcatggtcgtcgggttcatgatcggcggacgcagcggcatgatgatcgcgttcctggtcgcggccgggatgaatttcttctcctactggaattccgaccgcatggtgctttcggcctaccgcgcgcaagagattgatgaacggaacgcgccggagttctttacgatcatccgcgatctctcgcgcaatgccggcctgccgatgccgaaggtctatctctacgacagcccgcagccgaacgcgttcgcgacaggccgcaatcccgagaatgccgcggtggcggcatcgaccggcctgttgagcgcgctatcgccggaagaggtcgccggcgtgatggcgcatgagctcgcgcacgtccagaaccgcgacacgctgacgatgacgatcacggcgacgcttgccggcgccatctctatgctgggcaatttcgccttcttcttcggcggcaatcgcgagaacaacaacaatccgctcggtttcgtcggcgttctgctggcgatgatcgtcgcgccgatggccgccatgctggtgcagatggcgatcagccgcacccgcgaatactccgccgaccggcgcggcgccgagatctgcggcaacccgctttggctcgcctccgcacttggcaagattgcccgtggcgcctcgaacattccgaactatgacgcggagcgcaatcctgccaccgcgcacatgttcatcatcaatccgttgaccggcgcgggcatggacaacctgttttcgacccatccgaatacggaaaaccgcatcgccgcgttgcaggaaatggcacggggcggcatgaataactcgacgccgtcggttcgtgctgctaatcccgtgcgcaaatcgcgctcagttccggatgccggccttggccgcggtggctcgcaaccgccaaagggtccctggtcttgagttcagacggtaagaaaaagccatttcgcaaacaaaagccgtcggcgccgtcggcatcttccgcccccgcaaagccgggtctgcaggcgcgtgccgcggcctcgaagatcctggccgccgttatcgatcgcaagctctcgcttgacggtgcgctcgaccatgaacatggcaatccggcttataaggcgttggccgacgatgaccggggtctcgtgcgcgcgatgctgaacaccacgcttcgccaccttccccgcatcgaagccgccgtggcatccctgctggaatcgcctttgccagagggcgcccgctcgctgcaacacgtgctctcgatcgccgcggcgcagatcctctatctcgatgttcccgatcatgccgcggtcgacattgccgtcgaacaggccaacctcgacccgagaaatcgccgcttcgccaagctggtcaacgcggtgttgcgtcgtctgggtcgcgaaaaggaagaaatactccgggagatcgacgacatcccgtccatgcccggctggtttctggaacggttggagaaggcctatggacgcgaggcggcgcgggcgatctcggattcccagctacagcctgccgccatcgacctgacggtgaagtcggatgcacaggcttgggcggaaaagctcaatggcgtcgtgctgccgaccggcggggtccggctcgccgcattcgacggctccatcccgtctctagaaggtttcgacgatgggtcgtggtgggtgcaggacgcggccgcgagcattcccgcgcagctcttcggcgatctgtccggcaaacgtgtcgccgatctctgtgcggcacctggcggcaagaccgcgcagctcatccttgcgggcggcacggtgacggctgtcgagcagtccgaaaaccgcatcaagcgcttgcgttcgaacctcgaccggctccagctgtccgcggaaacgatggctcaggaccttacaaaattcacccctgacgagctcttcgacgccattctgctcgacgcgccctgctcctctaccgggaccacgcgccggcatcccgacgtgctctggaccaaggggccggaagacatcgcgaagctggccgcgttgcaggaacgtctgttgcgccacgcgttgcggctgctgaagcctgaaggcacgatcgtgttctccaactgctcgctcgatccgatcgagggtgaggaggttgtggcgcgggtactttcggatacgacaggattcgagcgtgtggcgatcgagccgagccggtggccggggcttgaggaagcaatcagtccgcttggcgcgtttcgcaccacccccgacatgctgaagctgccggccggtttcgcgtcgggtctcgacggtttttatgcggccgtgttgcgccgtgttgcctgatcgaagagcagctggcatagtcaagcatcattaccgaatcatcgacggtcagtgccgtttccggacttgtccatccagtcctaacgatatgggtcaatagacaatcgaaatgcggtccggacggttttcaggtctttacctgcgggaggcttggcggcgggcactttgccgtgctgcactcgtgcgcctcaagttgtttcgccacacggtctatgcgcccgagcggcttatcgtggcgccgacggatctgagacccgtcgattcgcatgtggccgaggaaatcatcaacggtcgttttccgctcgccggtcgtatgctggagacgggtggaaagtcgccattcacgctgagccttccctcgcgcgccttcgccatcaggctgcacggcttcggctggctgcggcacatgcgctcaaagaagaacgatctgcattccaacgtcgcccgcgcgatcgtcaacagctggctgtccattcacggcgggcggatggaaggcattgcctgggagatcgatgtcacggcgatgcgtgtcattgcctggctttcgcactcgcccgtggtgctgcagaacgcggatcgcggcttttatcgccgcttcgtacgctcgctcgcgtttcaggtgcgctttctcaggcggatggcgcgctatgcgccgcccggcgaggtgcgttttcgggttcgtctcgcgcttgccatggcgtcgatctcgatgccggtgcggcccagtgtgatccgcaaagcctccgacgcgctcgacgtcgagttcgatagccagattctgccggacggcgggcacgtgtcgcgcaatccgcgcgttgcgctggagcttctgctcgatcttctgccgttgcggcagacctacatcaatctcggccacgaaatgccgcagaagctgatatcgggcatcgatcgcatgtatccggcgctgcgctttttccgccatcaggatggcgatctcgctttgttcaacggcgcgacctcgacctcggcgaacgagatcgtttcgttgctgcgctacgacgagaccgccggcgagccgttcaaggcgatgccgcattcgcgctaccagcggctcgcggccgggcgcaccgtcgtgattgccgataccggccttccgccgaccggcaatctctcgcgcactgttcatgccggatgcctgtccttcgagatgtcatcaggacggcaccgcttcatcgtgaattcgggatcgccgaaattcgccggcaaccgttatgtgcaggtcgcgcgcaccacggcggcgcatacgaccgtgacgctcaacgatacgtcgtcgagccgcttcgcctcttctgatttcctggcgcacctgatcaccgagcctatcaagaccgtgcaggtcgatcgcgtcgtggcggatgacggccgggatgtcgtcaaggccagccatgacggctatttgaaagagttcggtgtgctgcacgaacgcgagctgaccctgaacgccacgggttcgatcatgaccgggctcgatcgcctcgccgttgccgaagagcgcaagggcgagggtgagttgcgcgccgtcgcgcggtttcacacccatccgtcgatcaatctgaagcagatggaccgggagtccatcctgatgacggcgcccgatggcgaaagctggctgttttcctcgccgggcaatacggtcgagatcgccgaggacgtgtttttcgcggacgcctccggtatctgcgcctccgatcagatggaaatcagcttcgcctatccggaaaagccggaaataaggtggtttttgtcccgtagaagctagcggctgttttcgccggcttaaagctgtgctaacgcggcgccatattccgcgcacctcgccggatgtctcccgaagatcgaacggagaagccacatggccgttgtttccaagaaaatccccgcccccgacaaggttgccgtcaagaccgccttgctctccgtgtccgacaagaccgggatcgtagaccttgcgcgtgcgcttgccgaaaaaggcgtccggctgctgtcgaccggcggtacccacaaggcaatcgcggcggccggcctcgacgtcaccgacgtttccgacgtcacgggctttccggagatcatggacggccgcgtgaagacgctgcatcccaaggtccacggcggcctgctggcgatccgcgatgacgccgaacatcaggaagcgatgaaggcgcacggcatcgatggcatcgatctggccgtcatcaacctctatccgttcgaggacgtgcgtgcggcgggcggcgattatccgaccaccgtcgagaatatcgacatcggcggcccggcgatgatccgcgcttcggcaaagaaccacgcctatgtggcgatcctcaccgacccggccgattacccggagcttctcgagcagctgtcgtcggatgccggccagaccagctatgccttccgtcagcgcctcgccgccaaggcctatgcgcgcacggccgcctacgacgcgatgatctccaactggttcgccgaagcgctgtcgatcgacacgccgcgccaccgggtcatcggcggcgtgctgaaggaagagatgcgctacggtgaaaatccgcaccagacggcaggcttctacgtgaccggcgaaaaacgtcctggtgtggcgacggcaacgcttctgcagggcaagcagctctcctacaacaacatcaacgacacggacggcgctttcgagctgatcggcgagtttgcgcccgagaagaccggtccggcctgcgccatcatcaagcatgccaatccgtgcggtgtcgcgaccggcccgacgctgaaggacgcctatctgagagcgcttgcctgcgacagtacgtccgctttcggcggcatcatcgcgctcaaccagctgctcgatgcggagaccgcggaagagatcgtcaagctgttcaccgaagtcatcatcgcgcccgaggtgacggaagaggccaaggcggtcatcgccgccaagaagaacctgcgcctgctcgtcaccggcggcctgcccgacccgcgctcgcgcggcatcacggcgaagacggttgccgggggccttctggtgcagagccgtgacaatggcatgatcgacgatatcgagctcaaggtcgtcaccaagcgccagccgacggcgcaggaactgctggatctgaagttcgcctacacggtcgccaagcacgtcaagtcgaacgccatcgtctacgccaaggacggccagacggccggtatcggcgccggccagatgagccgcatcgattccgcccggatcgcggcgctcaaggccgaggatgcagcgaaagccatgggctgggccgagccgatgaccaagggctccgccgttgcgtccgaagccttcttcccgttcgcggacggcctgctgtcggcgatcgccgccggcgccacggccgtggtgcagccgggcggctcgatgcgcgaccaggaagtgatcgacgctgccaacgagcacaatgtggcgatggtcttcaccggcatgcgccatttccgccactaatcgacgaagacggttacgccctatccgccggatagggcgtccggatcaacaggatcagcccgccggccagaaacaggacgagcgtggccatgccaagatgcgacgagccggtcgtgtaggtgacgatcgaaaacagaagcgtcgccatgaagctggttgcgcggcctgacagggcgtagatgccgaaatagcggccggcctcatcaaggctgacgctgcgggccagataagagcgcgacgaggcctgaaccgggccgaatgccaggccgatcagcaggccgtagccgatataggccttctccgccgccgtgccgaacaatccaccggaatcggtcgcgggaagcggcaccagcccgaagagcgtggagcccggttgggtcgatacgatgccgaatgtcgccaaaagcagcatggtaagactgatgaggatggtcgccttcgagccgatgcgggcgtcgatccgtccggcgatgacgcaaccgaaaatcgccacaacgttgagaatgatgccgtagatgccgatctcgatggtcgcccagccgaacatgccggccgcgaaggcgccaccgaggatcagcaagccgttgacgccgtcctggtagatcatgcgggccacgagaaagcgcagcagcgagcggcgttgcttcagttcgcccagcgtgtgcctgacttcgcggagcccggagcgcacggccgcagcgaagggaaggccgccttttacatcgggggtgaacagaaacatcggcagtacgaaaatcagataccacacggccgagatcggtccggtaatgcgagcatcctcgcctgtccttgggtcgaggccgaacaaggggtcgaggcctaggatggtcttgcctgtctccggacttccggcgagcagcgccaccaccgcaatcagcacgatcattccgccaaggtagccaaggccccaggcggtgttggacaggcgtccgacttcgtcctttccgacgaggcgcggcatcatggaatcgttgaagacgatcgaaaactcggcggcgatcgatgccaggatcatgaagatcatgggatagatgacgggtgagccgggtgctgcgaaccagaggccgcacaggctggcgatcttgatcacggcgaaaaagccgatccatggctttcgcccgccggactgatcggcaatcgagccgagaatgggggagaggatggcgatgatcaccgaggagatcgtcgccatgttgctccagagcgtctgcgctgaaacaggatcggccgtcagcctggccacgaagtaggggccgaagatgaaggtggtgacgacggtgaagaagggttgtgccgcccaatcgaagaacatccagccccagatgcccctgcgcgtcgcgcgctggggctgtgttcccgtccagtcaatgcgattcaccggcctgctcctgatgtgggagcggactgtctcacctcgtcccgtctcttgcaaggtcggtcagcaggccggccgcgacggtgatgcgggccaggttagggtcgccaccctcgctgaggccggccagttcctcggcgatgcggttgatcctgatccggtcgctcgcatgccatgcctgcaccggcagcttttccttgccgttgttcgacagcgctgagctgacgatatcgcggcgcgcggtggcgatctggtcgaggcttcgcgccagcgccaggttctcgtagtgatccgaggtggcgatgcggccgccggccgccagcagccgtccgatacggaaggtcttgctcaccgcgaagtagctctcggcggcgcggatgagcggctcgcccgtgcgctcagcgatctgcatgatctcgggcacgagcgcgaagccgatcagatgagcgatttcggccgaaagcccgtccggcacgccgccggcctgatactcggcctggcgcgcctcgagttcgggaacgatctggctggcgaagaccggctgcagcttcttgaaggccgcacgcagtctgtcgatggtttcggcgatatctcccttggccatctgcatcttcaacagcagacgcgtgagcacggtgaagatatggctgatttcctcgtagatacggttctgcatctggccggaaatcctgccatcgagcgcatcggtctcgctccagagccggccgagatcgaagccgtcgcgggcgatgatggcggcgcgcacgacttcgggtgccgatgcggccgtcgcgtccatcatgctgacggcaaagcttgggccgccgcggttgatggcttcgttggcaagcacggtcgccacgatctcgcgcttcaggcgatggttagcgatatcggaagcgttggacttgcgcatcttggcggggaaatattgcgagagcgttgcctcgaaatagggatcatccggcaaatcgcttgccgcaagcgcgtcgaagagaacgatcttggcgtaggacaggaggacgccgacctcaggccgtgtcaacggtctgttggcggcgtatcgttcggccatggcggtgtcgtcgggcagcgtctcgaccttacggttgagctgcttggcggtctccagaacgcccatgaagcgggcaagctccaggccgttcgcggtgcctttccgctcggtcagcgagatggcgagcgactgaaggtagttgttgcgcagcaccagcttgctgacttcatcggtcatcgaggacagcagctggtcgcgcttctgccgcgtcagccggccttcatgcatggcggccgcgagcgcgatcttgatgttgacttcgacgtcggaggtgttgacgccggcggagttgtcgatcgcgtcggaattgcagcgaccacccttcagtccgtaggcgatgcggccgcgctgggtgacgcccaggttcgcgccctcgccgatgaccttggcgcgcacctcgtcggcgctgatacggatgggatcgttggcgcgatcgccgacgtcggtatcggtttcggcggccgccttcacataggtgccgatgccgccgaaccagagcaggtcgacagggcttttcaggatcgcggtcatgacttcaaacggcgtggcaaccgtcttgtccatgccgatcgcggcggcggcctgcgcggtgagcgtcaccgatttcgccgagcgcgagatgatcatgccgcccttcgagagcaggctcttgtcgaaatcctgccagctggagcgcggcagattgaacagccgctggcgctcggccagggtcttggccatatccggatcgggatcgatgaagatgtcgcgatggtcgaaggcggccagcagccggatcttcggcgacaggagcatgccgttgccgaaaacgtcgcccgacatgtcgccaacgcccgcgaccgtgaacggcgtcgtctgaatgtcgatatccatctcgcggaaatggcgtttgaccgtctcccaggcgccgcgcgcggtgatacccatcttcttgtggtcgtagccggccgagccgcccgatgcgaaggcgtcgtcgagccagaagccggcttcctgcgccagcgcgttcgcggtgtcggagaaggtcgccgtgcccttgtcggcggcgacgacgaaataggggtcatcgccatcgagccgcacggtgttttcgggcgggatgatctcggtgccggaaatgttgtcggtgatcgaaagcagcgtgcggatataggtcttgtaggcttcccgccccgcgttgaagatttcatcgcgattgccgccgatcgggagcctcttcggatagaagccgcccttggcgccgacgggcacgatcacggcgttcttgacctgctgcgccttcacgaggccgagcacctcggtgcgatagtcctcggcgcgatccgaccagcgcagtccgccgcgcgccaccctgccgaagcgcaggtgaacgccctcgacctcgacgccgtagacgaacatctcacggaacggcttcggcgccggcaggccgtcgatcaggtgtggatcgagcttgaaggccagcatcgccttggcggaaccatcgggattgcgctggaagtagttggtgcgcagcgtcgcgtcgaccacgttgacgtatcggcgcaggattcggtcgtcatcgaggctcggaacgtccgacagagcggtctcgatttttgcgtgaagatcggtcgccttcttgatcctgttcttctctgtcagcttcggatccaggccgtcgtggaacaggcggaagatgagcgacgagatagccggatatttatccagagtcgttgcgatgtagtcctgcgaataagcgatccccgcctgtctgagatagcgcgaataggctctgagaacgctggcctcgcgcgccgaaagcccggccgagatgatcaggcggttgaagttgtcgttgtcgatgacgccggcgaaggccgacaggaatgcttcttcgagtgctgcgccatgctgctgcagatcgatttccgcgccgctctgggcttcgagttccatgtcatgcaggacaaccagcttttcgctgccgtcggccagcgtcacgccgatgtcgaacgtaccctcgctgatgacgctgaagccgagattttcgagaagcggcacgcggcgggagagcgcgagctggccgtcggcgtgaaagatcttcaggcacaggagcgacgtgccgtccttgatgcgcgtgtagaattcgatgcgggtctgttcgcccgtcgcgcagccgacgatgtcggcgaagtcggcgaatgtttcctctggcgggaacagatcctggaacgcgttgctgaccgttatcctcggcgccttcggaccggcgagcatttcgaagcggtcgtcccagcgggccgtgatggcgcgaattgcttcttccagtttcgcctggtggatacgcggggtctttccgccagagcggccgatgatgaaatgaacgcgggcgacgccgccttcggggaaagccgggtaataagccgagacacgaccgtcatagatggtcttcagataggtccctattttctcccgcacgatcgaatcatattcctcacgcggaacgtagacgatgacggaaacgaaacgatcgaagtgatcgatgcgcggcagcacgcgtacgcgcggcctgtcggtaaggtcgttgatctgttcggcgaaggtggagagcagcgcggtgtcgatctggaagagatcatcgcgggggtaggattcaagggtgttgtcgagcatgcggcccgaatggctcatcggatcgaagccgaaatgttccttcaccttttcgaccttggagcgcagcagcgggatatcggttgcgagcgaggtgtaagccgtggaggtgaacaggccgacgatgcgcagttcgccggtaacattgccattctcgtcgaaacgcttcacgccgacatagtccatataggcgcggcgatgaacgacggatttgacgttcgccttggtgacgatcaggaattccgggccgtcgaggaaggcgaggatctcgggcgtcgtggttacagcgtcgcggccggttcgaagcaccagcacatcgggattggagaggatgcccagccccgtgcccttgtcacgctcgaccttcgcattcgatcccttgccggaatagacatattcgcgcattccgagaagcgtgaaattggcatcgcgcagccaggtgaggaaagcgaccgcctcgtcgcgatccgccttgcggcggccgacattgcgcgacgacagttcgtcgatggcggtgccgagcttgtccagcatcggcttccagtcggaaaccgccagtcgcacctgttccaaaacgatttctatgcgctctatcagatcggccgactgtgccggtgtgagtggtgcgaggtgaagctggatgtggctgacgcggttggccgcctcgcccggcatatccggcgaatagagctccggcgggtgaccttccgccatgacgagaatgggatgcaccgccatatagagatcgcggtaactgctcgtcacctcgcccatgaccgattcatagaggaacggcatgtttcgatcggtcaccgacaggaccgataccgccacgccatcgggctcgacattgtcaagcgaggtcacggtgacgcgcggggcattgccggtccaggcggcaagttcggccgcgcaatgaacggcggagattgccagcatctcgggcgtgtaggattcgaggtcgtcgccgctggcgcgtccgaagagaacatccggcgcgagatagttctcgcccatcgcggtcgcgatcttgttcgcgctctctatctgcttttcccgtttcggattgtttcgagcagccattgactgtgttccctcattttctcgattgcgcgcaggttagcagaaggtttgacagaaaaattgctaaattggggacgtcgatggcagttttcgtgcgaatttagccggcacgtcgtcaattttgcaaaaaaatgatccggatgtggtttttctcgacagaactttgatcacgcccgaatgaagagttgttgacagtcgcgcggcaaaaagacgatcaactgaggatcggaacccggatcggaaaaacatgtcgcaggatgcagcaggcaccgtcatcgtcatatcgagccatgtcgttcgtgggtcggtcggcaatcgggcggcggtcttcgcgctcgagacgctcggccatcaggtgtgggcgcttccgaccatcgttctgccctggcatccgggtcatggtcgttcgacgcggctcacattcgccgaggcggatttcgatgcggctatcgacgatctcattcgggcgccgtggatcggcgaggtcaaggccgtgctgtcgggctattttggcaatgccgcgcaggcgcgctccgtcgcccggctgatcgcggcgctcagggagcgcaatcccgatctgttttacgtttgcgaccccgtcatgggcgacttgggcggcctctacgttcccgaggcgaccgccgaggcgatccgcgaccatcttatcccgctggcatcgctggcgacccccaatcgctatgagctcgcctggttgtccggcgcgccgctggagagcaacagcgagatcatggaggcggcgctcgcccttggtcccgcgcgcatgctggtgacctcggcagtgccgatgatggcaggtggaacggggaacctctatctttccggccgccacgcgctgcttgccgaacaccggttgatcgacaatccgccaaacggtctgggcgatcttctcgccgcgcttttcctgtcgcggcttcagtctggcatggaagacgaaaaggcgctgcagctggcgacggccagcgtttacgaggtgctggctcgggcggtgaagcgcggtagcgacgagctgacgctcgcaaacgacgcctccagcctgtcgacgccgatggcgatggtgcagatgcggcacctgatgcaccctgcgcagcggcgaaagcgctagcagttgcgccgttaacgcatttggcgctgcgatattgatcttgcatcgctcacgctgtaatcgaagatcatgcagcgttttccagacacacttctcgacggctatcgcaacttcatgagcgggcgctatgccgatgcccgcgatcggtacaagacgctggcggaacacgggcagagcccgagcacgctggtcatcgcctgttcggattcacgcgcggcgccggagctgatcttcgattccggtcccggcgagctgttcgtcgtgcgcaacgtcgccaacatggtgccgccgtacgagccggacagcaatttccatgcgacctcggcggcgctcgagttcgcggtgctggccttgaaggtcgccaatatcgtcgtcatgggccatggccgttgcggcggtatccgagcagcgctcgatccggatgccgaaccgttgtcgccgggcgacttcatcggacgctggatgtcgctggtgcggccggcggccgagcagatccagagcaatgatgtaatgacgccgggcgaacgccagacggcgctggagcgcgtgtcgatccgcaactcgatcgacaatctccggacctttccggagatcaaggcgcgcgaggaagccggcgagatccagctgcatggcgcttggttcgatatttcgaccggcgaactgtgggtcatggacgcggagacgcgcgacttcattcgccccgatgtctgataccatcatcgggcacagataaaaggcgccgcggtttcccgcagcgccttctcattttcatcttttcgaaatcagttcgcgtcgatctgcttgccgatgtaggcgatcgcctgctgataaaccgtcgcggcgttccaaccgtcgatggcgacgaagttcggctcgcccggctgatagccggcgcccggggtccagcccttgcccctcaggaagttcgcggtcgaggcaagcgcgtcggcgcgtgagccgaccatgtcgaccttgccatcgccatcgccatcggcaccatagagaaccacgttgcggggcaggaactgggtctggccgatttcgccatgggcggcgccacgggcctgagggctgaggaagccttcgctcacgagctgcagggcagcataaagctggtcggtgaaataggcgctgcggcggcagtcgaaagcgagcgtggataccgccgacagggtgtgctggttgcccatgtagctaccgaaaccggtttccatgccccagatggcgatcagtggaccggccggaacgccatacttgcgctcgatggaggcaaagagcgccgcgttggcgcgcttcatgcctttgccgcgcgagatgatggcctggccaccgcgcttctgcatgaaggcgtcaaaggacagcttgaagctcttctggccgcggtcggcggcgatggtcggtctgttgtagacgacgttggcgaaggccttgtcgagaacggagcggctgacgccactggccgctgcttgctgcttgaaggcgaccacccactgttcgaatcccgcgctggtgtcactgcactgtggtgccgcttgagccatcgccggaactgcctggaacatggcgagcattgccgccgctgccagcaaaagtcttgtcttacgcatcgaataccccgatctcgatcagcctagccttaaccgggctgcggcccgttatcggcgatattgtcatgaccatccgcctgaaaagcgcgggaagccgtttggcatcccgcgctccgaataagccttaacttaagtaacgggcttaacaagacatggttaataaaatattcaagcagcctgcctgcgcggcttcacaagtccgcgattgaccagcagttcggcgatctggatcgcgttcaatgccgcgcccttgcgcagattgtcggaaaccacccacatgttgaggccgttctccaccgtcgcatcctcgcggatgcgcgagatgtaggtcgcgtcctcgccggcggattcgtaaggcgtgatgtagccgccgttctcgtgcttgtcgatgacctggcaacccggcgcgtcgcgcaggatatcgcgggcctgatcggcggtgatttccttctcgaactcgatgttgaccgattccgagtggccgatgaagacggggacgcgcacggccgtgcaggtcaccttgatcttcgggtcgagcatcttcttggtttcggccagaaccttccactcttccttcgtgtaaccgtcttccatgaagctgtcgatgtgcgggatgacgttgaaggcgatgcgcttggtgaacttcttgttctcgatcggatcggcgacgaagacggcgcgtgtctggttgaagagttcgtccatgccgtccttgcccgcgccggaaacggactggtaggtcgagacgacgacgcgcttgatcgtggcggcgtcgtgaagcggcttcagcgcgacgaccagctgcgcggtcgagcaattcggattggcgatgatgttgcgcttggtgaactgctcgattgcatcagggttcacttcgggaacgaccagcggaacgtcctgatcgtagcgccatgcggaggagttgtcgatcacgacgcagccctgcgcgccgatcttcggcgaccacttcttcgatacctcgccgccagccgacatcaggcagatatcggtgtcggaaaaatcgtagttttcgaggttcatgaccttgagggtcttgtcgccataggaaacctcgagaccctgcgagcgcgcggaggcgagcgctacgacttcgtctgcgggaaaaccgcgttcggaaagaatgttgagcatctcccggccgacatttccggtggctcccgcaactgcaactttaaaacccatttcaagctctctttctcatctctcctcttgttcggtgaggggaaagcgcgcaacgattgcggcttcctgtccccagccgagccggggagagagcggcaggccagagacgtcagacggttttcgtcgtcgttttggccttggttttggaagaaaccggaaaaatcataaccaccccggcaactcgtgcccggtcactgcgtgcggcaatggcgtgttcctggagaaccatggatattccttttccaccgctgctcataaaaggttttccacaggagtcaaggtttttgcgcaaggccgcgccgccgcgcatggcgccgaagcggccttgaggtgttacttcctgttcatgccacgggagcgatcggcacgcacggaaaccgcctgcaatcccccggtctgcggtgccctgaccttgccggacgcggcgcgagcgagcttgcgcttgttttccagatgataggcgtagacgaactggataacgaggccgagagccacgaagatcgggccaatgaccttgtcgccattgctgatgtaaagcagcacctgaccgaccatcgccaggatcgtgccggcgacgaaaatgttcagcgaatggcggccgaagatgaccagcggattgctttccggacggcgcagcagactggagagcgcgtcgatgttgagcaccagatagctaagcgccagcacgtgcaacaggcggggcaaggacaggaaggtcttgtcgaaaccggtaatgacggtcggaaggccgagcgacgccagcgtgttgccgataccccaaagctgaccgacgacccacacgaaggacagaccgacataaccggcagccagagccatgagcagcgggtggcgcggcagcttgccgccacggcgcacatgcatcatgccgacgatgccgatggtgaagaggaactgccaggacagcggattgaggaaccagtagccctcgatcagcgtgttgcgcggcgcgatctcgaagatgccggagagcagccagaccgagcccgatacccccaaggcgagcagcgggctcttggcttccagcagcagaatgatgggcaccatgagcatcaaggctccatacatcggcaagatgttgttatagccgatctggtggcccagcagcatcagggagggaatgcctgcttgcggattggtgagaaccgcgaggatgttgatctggcagagaagccccgggcgatgaaacagccaggcacccgcgaggaagagcgcgagcgtcatgaacgtggtgatcatgtgggcgagatagagcgtgaaggcgcgcttcgtcgattgcttagcggtttcgaaccaggcgccgatcttgaagcgcgagccgtacgcgatacccacggcgatgcccgagatcagcacgaaggcttcggcggcgtccgaaaagccgtaattcttggtggtcagatattcgaaaatctggccgggcacatgattgatgaagatcgtgatcaacgcgagaccgcgcagaacgtccaatcgcgtgtctcgtttcgatggcgccgcggtcgcaatcctgcgctccgcaccgaacgtattttcgggcgtcgttaccattgacctctccatgcttccatttgcaaacgcagttgaggccaaaaggtttcccttttggcctcaacgaatcgccggatggtttgcaggaaaagtgcggttatccgaccggatatccctcgtcgggatcggtgacttgacgtccgttgatggtcagatcgtacccccgcggatgggacgattttgagaccgaaatgaggtatttggccccagcgtgctcgatttccgcggagaagccttcccatgttgtcgggagcgagggcttcacatggatacggccgttcttgagccggattccaagaatgccctcgaccgccgcgcgatagagccagccggcggaaccggtgtaccaggtccagccaccgcgaccggtcaagtcgccgtcgccatagacgtcggcggcgatgacatagggttccacgcggtagtgctcggccgaagccgggtccctggagtggctgatcgggttcaggaggtcgaagcaacgcagcgcgtcatcgccacggttgagttcggccagcgccatgaccacccaggtggccgcatgggtgtactggccgccgttttcgcgaacgccgggcggataggccttgatgtagccgggatccttggccgagttggcgaagggcggcgtgaacaggcggatgatgcgtgcatccatgtccaccagcttcgagagcaccgagtccatcgccttggcggcatgggccggatcgccctcccctgacagcacgctccaggactgcgcgatcgaatcgatctggcattccaggctttccttcgagccgagcaggctgccgtcgtcgaaggtgccgcggcgataatgggcgccatcccagccagcgctttcaagcgccgccttgagttcggccagatgcttgctccagcgctcgacgcgggccgtgtcgccacgttcggcggcgaaggtgctgaaggagcggagcgcgccggcgaggaaccagccgagccagacgctcgtgcccttgccgccgatgccgacgcggttcatgccgtcgttccagtcgccgccgaggaacagcggcatgccgttcgctcccttgcgggcgatggcgaggtcgagcgcgatcgcggcatgctcgtatatgctcaccttgtcctcggatatttccgggcggtagaaggaatcgtgctgaccctgcagaagcgccggaccctcgatgaaggagagctcatcgtcgagaacgctcttgtcgccggtcaccgtgcaatagtgatggatggcgtaggccagccagaccacgtcgtcggagatcagcgtgcgcacgccggcaccggttcccggcagccaccaatgctggacatcgccttcccggaactgacgcgaggcggcgttgacgatctgcttgcgggcgatcgatggctcgtgcagcacgaaagccaaagtatcctgcagctggtcgcggaagccgaaggcgccgctggcctgatagaaggcggtgcgtgccatgatgcggcagccgaggctctggtaggggagccaggtgttgatcagggtgttcatgccctggtcgggggtcgagatctggagcttgccggtgaaggcgtgccagaaatcccgatttgcctgtaccgtaccgtcgaaggacgacttgcggatatccgttatcagcgcgcgggcttcctccttcgtcgcggtatcgccgagataaaggatgacatctcgctcctccccagcggcgagatcgatgtcgatcgcaagagccgccgccggatcgccgtccagatcgatattgctcgacagaacggtagccggattcaaagccatcggagccttgatgctgcccggcttgccaatgaactcgcggcggcttgccgtgtagcccgacaatgtttcgctggcagcgaagaacgccacgcgcgaggagtagtcgatgctgtagttgttgctcgcaaacagggcgccggtctcggcgtcgtgctcggagagaatgaacggcgccgtcttctgcgggttgttgccgagcacccactcgacatagccgtagagacgaagcttgcgctgggtgccgccgttgttgcgcagacgcaaccgctggagcttcaccggacgttcgcgatcgaccgtctgggtcagttccagcgccacgtcgttctggacgctggagaagaccgagtagccgaggccgtgccgggcctcgaactggatgtcctggcgatcggacaaagcggcgaagggtgtcatgacggcgccgctgtcgcgatccatcacatagatcgcctcgcccggccggttgatgaccgcgtcattggtccacggggtcagctggtagtcacgcgaattggtgctccaggtgaagcccgcgccttcggccgcgacgtggaaaccaaatttctcgttggagattacgttgatccacggctgcggggtggcgtggccgcccgggatgcggacgacatactcgcgaccatcgccggagaagccgccgatgccgttccagaagttcagatcgccgtgctcttcgataaccagtgccgggaccgaagccctggcggctggtaccgtgcgcttggcccgcgaccgggcggcgttggccttctcgagttccagctgctcttccttggtcggcgcgaacaacgccacggcacgattgatctgatcgatgatcttgccgttcttggcatggaaggtgacgcgggatgccgaaatcagcgcatggtaggtcgattcctccatcaggtccttgcggaccgtgaagatgtgctggcgcagcccgtcggcctggccgagacgacggacgttctctgccatctggtcgacggcgtgctgcatgtcctgtgcataggaggaagcgcgctcgttcatgatcaccagatcggcggtgacgccgcgcgagcgcaggtattcctgtgccagcagcgcctccttggcgatgtcgaggtccatgtcgtcgttgatgcgcagcgtgaagatcgggaaatcgcccgaaatcgccagcggccagagcgaggactgcgactgcatgcccgcctgaaccgcggccgtatccgcgcgcagatacatgtccgggtagacgaggtggcggccgagatgctggaaggcggacgcctgttgcgaggtgacgccgacgtggcgcatctgcacctgcgtgcgtgtccaggcctggacgagttcgtgattgaaggaatcggcgtggcggtagcgatcgaccgcctggtccacctcgttgcgcgatggtgccgcgatggtccagaaaatcacactgaccttcttgccggcgggaacacggacggtgcggcgcagcgacagcaccggatcgagcgtgaaaccatcggtgcccgacagcgtggcgccctggtcgaaggcggcagcgtttgcaaggctgcggccgcgtccgaggaacttccggcggtcggtttcgaactcggtggggcgcgtcgtgccggcgttgtcgacgatcagatgcgcgaccgcgatattcggttcgttgccgtcgcgcttgttacgctcgacgcgaatgacgtcgccgcgcttgccgatctccgtcttcacgaacatgcgggcaaaagccggatgggcgttgtcggtgtcgtcggtggtcagtaccggctcgagataggaggtcacttcgatgaagcgatcttccgtgccggtgttgagcagcgtcaggcgccggccttcggcatcgtgctcggtggcgacgatgacctcgacttcgctggtgagctcgccgacggtcttggtgaattccgccttttcatcggcgaagagaaccttgacttgctcgccttcgatgctcttcggttccgccgtcgccgaccaccattcgttgctggcggtgtcgcgcaggaagatgaaggtgccccagcgatcctcggtcggatcgggcttccagcgtgaaacggactggccgttccagcgcgagtaaccggcgccggttgcggtcagcatcatcgagtagtggccattcgacaggaagaccagttcgcgatcgcgcgccgccggatcgtagatcttgcggatttccggacgcaacaggtcgtcctggatgctggcaggcgtgtcggactcgtgcttgccgctcatcactggaatgtcgcgcggtgccttttcctgcagcatcagctcggccgcttcgatgacgggatcggagtggaagagttcgcgcagatggccgttgaaagcgacgttggcgacggccgcgatcgacatgccgtggtggtgggcatagtagttgtagaccaccgcgcaggtcttgccctcgggcacgcgggtcggtgtgaagtccacggcatcgtggaagccgtattttccaagcgcgccgagcttgcgcaggcgttcgaggttctcgatcgccgccggcgggttgtactggctggcgaggatcgaggcgtaaggggcgatgacggcgttgtggccgaggccacgcttcaggccgagcgtgggaacgccgaagttcgtgtactggtagttgaggttatggtcgcgggcgttgaaggccgcttccgagatgccccacggaatgcccagcttgcgggcgtagttcatctgctcgaccacgaccagattgttggtctggttgaggatgccgccgccacgctcctgcatgacgaggggcggcatcagatattcgaacatcgagccggaccaggagaccagcgcgccgcgcgagccgacaggcacgacctggcggccgaggcggtaccagtgttcggtcggcagatcgcccttggcgatgccgaagagactggtcaggcggcattcggaggcgagaaggtcgtagcaggcctgatcgagctcgccgctttcgacgcggtagccgatcgacagaaggcgacgctccgggcggaagaggaagccgaagtccatcgagaatgccagatcgcgggccttgtcgcgcagtgcgatcaggcgcgggcggagcgcgtcgatgttggcgaggtcgaaggtgctgtcggagatatgggcttcgcagaccttgaccagcgcctcggcccattgggtgacctcggcgctaagtgccgacttcacctcgtgatcgaggttggcggcgagcttctggatatcgcgggcaagaaccgagaggttgatgatgcggatcgacgcgaattcgtgctcgcgcttgacggcggcgagcgcgttctggaagccgatgatgcgctcttccaggcggcggcgcagcggacgcacggtcttgcgatcatccggcaggtcggccagcacttcggccaggataccggccgtatcgccgacgccgtcgaggctgccctgcatgtgcgcggacggggcttcggcccagttgcggcaggccgacgagatcgcgatcaggtgaccggcgaggttgccgctgtcgacagccgagacatagcgcggcccaagcgtttccagcgtatcggtgtgataccagttgaacaggtgaccgcggaacttctccatcttgtcgatggtggcgatcgtctgctccagacgctcgatggtttcctcgaaggagaaccagccgaactggcggcccgacaccacggacaagagatagacgccgatattggtcggagacgtgcgggtcgcgacgatgacgtgcggtgtttcctggacgttgtcaggcggcagatagttctgttcggccgtcgtgaaagtgtcgaaatagcgccaggtgcgacgcgcgatcttgcgcaggtcgttggagacggattcggccacttcgaggcgatcttcggtttccgccgactggctcacatagtaggcgaccagcggagagaggatccagagggcaacgaaaggaatgccgacgagataggcctggtcgccggaaaggacggcgaaggcgaggccgagcagcgccagtaccggcgcatgccacatggccttgtagtaggaccagatcgtgccctgcttgccggcctggacgcttgccgcggttttccactgcagcatcagcttgtggctgacgaagaggcggtagagggagcgaccgatggcgtccgccatcatgcaggcgccgtcggcgatgaagacgatgcggagcgcaacctgcgcattggcggcgcggatgtctgaccagacggtataaaggtgggcgcgggcgacgatatcgctggtgcgcgggatgatgccgttgatgagcgacagcgtcggtgcgacgaacaggcagaagatcagcacgatctgccagatcagggcgccgagcgggttcatgaagtaccagccgagcacggaggcgaagaaccaggcgatcggggtcagcgagcggcgcaggttgtcgaacatcttccagcggccgagcgcggtgacaccgtgcttggtgctgaacatgtagggcagaagctgccagtcgccacgcgcccagcgatgctggcgcgaggtttcgacttcgtagcgggtcgggaagtcctcgacgagttcaaggtcggtgacgagcgcgcagcgcgccatcgaaccttcaagcaggtcgtggctgagaaccgagttttcctcgatgcgtcccttcagggccgcttcgaaggcgtcgacgtgatagaggcccttgccggtgaaggtgccctcgcccgccagatcctgatagacatcggagacggtgaagacataggggtccagaccgcggttgatcgagaagacgcgctggaagacagaggcgtccttgcccgtggtcagggatggcgtcacgcgaggctgcaagacgccgtagccgctttcgacgcggccggtctcggggttgatcaccgggcggttggtcgggtgatagagcttgccgacgagcttggtcacggcgtcgcgcatcaggcgcgtatcggcgtcgagcgtcatcacgtattgcacgttttcaggcacgatattggcgcccggcagataggtcgtgtcgcggtcgccgcgcaggagcaggttcagctcgtgcagcttgccgcgcttgcgctcccagcccatccatgcgccttccgacggattgtagaggcggcggcggtgcagcaggtagaagcgggtcttgccgtcataggcgtagcgagcggagaggttggcgacttcgcggcgtgcgtagtcgagaacttcgagatcggccgccgtctcctcgacctggctgtccggccagtcgctcagcagcgcgaagtagatttcgccccgcgggttggcaagatagtgaacctcgatgttgcggacgagttcatcgacgctgtcgcggttcgagatcaggcagggaacgaccagaagcgtgcgtgcgtcctcgggaatgccctccttgaactcgtagccgacgaggcgcgccggcgtgacgaagaaggagagcacggtgttgaagagacccgtcgcgccttccgatgccggcagcgagaacatgatcagcagcaggatgatcgcgatcggcgccatgccggcgctcgccatgaactggccgacgacgaccatcgcgagaatggtcaggagcagcaccggtacggcgatcgacagccagttgaaccggcggacggcgcgaacgaagtgctgcaccagcgtcgggttgtaaaccgctctcgcttccagcttcgggcgctgcgcgccggccaggaagctgccgacattgggttcgtgcggctcgtcctcgcccgattccttcgcctcggccgtcatgtcgagcgcgagctgcgcgatctccatttcggtcatggtggagcgcttggcgagcttttcgatctgcttgcgatacttgttgcgcgagccggaatcgagaaggccgtagtcggaattgtcccagagcagcttgtcgacgtggctgacctgctcgacccagacggaccattcggtgtcgtcgatctcgcgcagactgcgaatgatgttgcccatcgtgacgttgccggaggagagacggctgtgctcggccatcgtcgtcgcttcggtgtcacgaccgagcgcctcaaggcgctcatccagccaggtgatggcaaggctcgaggtctgcgagccgtcgcgcatgcggtagaggaactgcgtcgagaaggtgttgtcctcggcaagcggctcaagcgtcttcagatactcggtggcttttgccgggtcggtcaggcgcaccaattcgtcggcggcttcgttggcgcggcggcgcatgcggcggctgcgctcgacgcggatcgagatgcggcgcaggttttcgaccagaacgtagcgcaccagcgaaggcagcgcccagagctcgccgatccgcaatgtctcgtgttcctggaaaccgtcgaccagcgccgtcaggctttcctgcgaaatggtgctatgggtgtgggccacatagagccaggccagcgccagcgtgcgcgggatctttgtgccgttcacgtcgattgtcggcaattcgcggtagaagcgcttggggaagtcgcggcggacttcctggatcgcttcctcgacgatgtagtggttgtccagaagccactcggcggccggggtaatcgtctcgccggcctccacgtccgccgctgtcgtgcggtagacgcgcaggatttccttttcgttctccttatgccgggcgaagaagtcgaagggtgcgaaagcgaccagcgagctgacacctgacgtggctgctgatgcacccatcgccctgatgtcttcgatcgacatataggtcgcgcggatcgagtcgttgtgatcgatctgcttggtttcggactcgcgggacaggctcggagacgtgggggaaatagacatgggttcggttctggatccaaacaaagttatggtcgttagggtttgccttgtgcactgccaaatatgactgccgcatgaacagtaccggtcttttgcggccacattgaaaacattggcagttgcaatcgaacggcaatgcgaatcgatttagatatgatcttgcgaccagccgggcaaagaggtgagcgcgattgaacgacgcctccccgccaagccaatcgggaaagttggacactattgcgacaattcaagtcaagaggtttcggcaagtggtaaacgcacgaaaaatccggcgcctttgggacgccggatttcactgattatgcgggatttagacgcggcgcatgagccgcgcgacaagcgatacaacaaacagcaccaggaatatgaagaacagtacctgggcaatcgatgctgacgcgcctgcaatgccgccaaaacccagaacgccggcgatcagggccacaacaagaaatacgagtgcgtagtaaagcattgccatctccttagtcgttgctgaccagataacggtggcgtgcctctttggttccgtgcccgatgaaaaagggtttgttttcggtacgctagctgatgacgccgcaaaccaaggctgcgagaaaggtgaacgcggctacaaccagcgccgcattggctacccgatgcagacgactgcgcgtcgttgccggcttcctggagcgagcggaacgatagtggtccgcgtgagtatgggacatacccaagtctgccatgtgttgcctccgcctgtttcggctcttcttgtgagctcagtttcttatatagtctatctagatggtagagataaaattccaccatatcggtcttgctgagaaaatccgtcttggcgccagcggcctaacagatggtgtgccaggcccagatcagggagcgctcgaccgcggtgtccttgcgggggctcttcttcttcgcgacgatctttcgatcgcgcttcgccgccttgaacagcggacgcgtccgctttgcagccttggctggaggtgcgaagtaacccatggtcatgccgccgagaaagaacatcttcatctccatgatcacgaaagctaacagccattaacgcaatcatgacagaagcaaggcagctgtcaatagtctagtcgattggtcgtgttttaacggaccgttattcttaacggcccgccgattgctaaaaatttcaattacttgaaaagactgggcttcaagctttgacgaagcctttgctcgcgaccatcaaacttttcgtgtagtcctcgcgaacttcggccttggcgagctcatcggccgtcaggcgctcgacgacctcgccgccgcgcatcacggcgaggttttcgcacatgtgggtgatgacgccgaggtcgtggctgaccatgacgaaggtcaatttccgatcgcgcctgacctgctcgagcaggttcagcacttcggcctgcacagaggcgtccagcgccgatgtcggctcgtcgagcagcaagatcgatggctcgacgatcagggcgcgggcaatggcgacgcgctggcgttgaccgccggaaagctgatgcggatagcggaaacggaagccgttgccgagaccgacctcgtcgagcgcgcgagcgatgcgcgtgtcgctgtccgagatgccatggatcgccagcggctcgagcagcagccggtcgatggtctggcgcggatgcagcgaaccgtaggggtcctggaacaccatctggaccttgcgatagaaggccttgcttcgcctggagccggagagctgttcgccgtgtatcctgatcgttccgtccttgacgggcgcgaggccggcgacggcgcgaagaagcgtggattttccggagccggattcaccgacgagaccgaaggactggccttcggcgatctcgacgctgacatccttcagcgcgtggaaatggtcgtagatgacggtaacattgtagatggaaagggctgctgtcatgcgaaccactccggcttgcggtccagcaccggcagcggatgcctgttttcgccgatctgcggcatgcaattcaaaagtccttgcgtatagggatgccgggcgttcttcagctcggaggccttcagttcctcgacgaccttgccggcatacatgacgatgacgcggtcgcagaaggaggagacgaggcgcaggtcgtgcgacacgaagatcaggcccatgccgcgctcggaaaccaggcggtccatgatcctgagaacgtcgagctgcaccgtcacgtcgagagccgaggtcggctcgtcggcgatgagcagttcgggatcggcgatcagcatcatggcgatcatggcgcgctgacccatgccgcccgatacttcatgcggataaagatcgaagacgcgcttcggctcgcggatctgcacggcctccagcatggcgatcgcgcggtctcgcgcttcgcccttgccgatcttttcgtgcgttctgagcgtctcgcagatctgccggccgatggtcatgaccggatcgagcgaatatttcggatcctgcagcaccatggcgatccgcttgccgcgcagttgccggcgctgcttggccgatgccgacaggaggtcgatgccgttgaagtctagtgtatcggccgtgacgataccgtgcggcggcgtcagtcccatgatggcgcggccggtctgcgacttgccggagccggattccccgacgatgccgaggcgttccttgccgagcgtgaaggaaacaccgcgcacggcttcgatgacgccggtgcgggtggggtagctgaccttgaggttcttgacggtgaggagcgtgctcattggccgctctccttcgggtccagcgcatcacgcagaccgtcgccaagcaggttgaagccgaggctgacgacgaggatggcgatgcccggcatggcggcgacccaccattggtcgaggatgaagcggcggcccgaggcgatcatcgcgccccattccggcagcggcggctgagcgccgaggccgaggaagccgaggccggctgccgtcaggatgatgcccgccatgtcgagcgtgacgcgcacgatcagcgaggagatgcagagcggcatgacatggcgcacgacgatgcgcagcggcgacgcgcccatcagcttcaccgccgagatatagtcggagcgccgcaccgtcagggtctcggcgcgcgcgatacgggcgtatggcggccaggaggtgatggcgatggcgatgatggcgttctggatgcccgggccgagtgctgccacgaaggcgagcgccaggacgagcttcgggaaggcgaggaagatgtcggtgatgcgcatcaggacggcatcgacccagccgccggcatagcctgataccgtgccgaccaggaggccgatcggcgcggagatgacggcgacgaggacgacgaccatcagcgtcaggcgggagccgtagatcaggcgcgagtagatgtcgcggccctggtcgtcggtaccgagaagatagccctccgtgccgggcggcagaagccgggcgtttcggaggtcaccgacgacgggcgagtgcgtggccagaacatcggcaaaggccgccatcagcagcagcgcgatgataatgaagagaccaacaaccgcaaggcggttggcggtaaactgccgccaggtgacgtaggcgcggccgagacgggcctgcgtgcgtgattgcggccggtcggagagcagccattcgcggcgggtcatcggtctggtgatgtttgcttgcatgctcatcgggtccgggtcctgggatcgagggtccgataaagaagatcagacaagaggttgatgccgatgaagacggtgccgatgacgatcgtgccgccaagcacggcgttcatatcggcattctgcagcgaattggtgatgtagaggccgatgccgggccaggagaagacggtctcggtcaggaccgagccctcgagcagtccggcataggagagcgcgatgacggtaacgagcgggaccgcggcgttgcgcagcgcatggccccagatcacccgtgtttccgacaggcccttggcgcgcgcggccacgacatattcctggctgagttcgttcagcatgaagctgcgtgtcatgcggctgatataggcgagcgagaaatagccgagcagcgaggccggcaggacgatgcggcggaatacgtcgtagaagacatcccactgccgctgaatggcgctgtcgagcaggtagaagccggtgattggtgtgaaggtgtattcgtagacgatgtcgatgcggccggggaaggcgacccagcgcagcttggcgtagaaaatcaccagcgagatcagcgccagccagaagatcggtacggaatagccgatgaggccgatgacgcgaacgatctggtcggcgaaacttccacgtcgaacggcggcaagaacgccgagcggcacaccgatcaccgagccgatgatggtgccgagcgtggcgagttcgatcgtcgccgggaagacgcgcttgatatcgaccatgacgggattggttgtcagcaccgaggtgccgaaatcgccggcgaggatgcctttgatgtagatgtagaactgctggtagatcggcaggtcgaagcccatttctcgccgcacgcgctcaaccacatgggcgggagcgcggtcgccgagaatggcgagcaccggatcgattggcacgacgcggccgatgaagaaggtgacggccagaaggccgagataggtggtgacggcggcgaccagaaaacggcccacagccttcgcaacaggaagagcacggccgggtttcggccgtgcttccgtctttgtttcgacgatactcaatctatcaatcctgtcggatcattccttgccgatcatgccgacaaagttggtgtcgaagctcgggccgagcttgaagttggtcaagcccttgcgatagcccgcgacttcggtctgctggaagatgaagacgaacgggctgttggccaggtacttcttctggatgtcctgatacatcgccgcacgcttggcgctgtcgcgctcgagcagggcagccttggcttccttgtccagttccggcgattcccaggtgttgcgccaggcgagcgtcttcacggtgccggcgtcggaattgtcagggttgctggtgaaggtgtcggcgttggagttcggatcgaagtagtccgaaccccactgcccgatgtagatgtcgtgcgtgcgggcgcggaacttggtcagcgtctgcttgccgtcaccggggatgatttccatcttgatgccggcctgcgccaccgactgctggatcgattcggcgatgccggtcacgggctgcgtgttgcgcacgtcgatcgtcaccgagaagccgtccttcaggcctgccttggcgagcagttccttggccttggcaacgtcgaacttgtaggggttctcatcgagcgcgccgagctggccggtcggcaggaaggtctggtggatcgtgccgatgcccttgatcagcgtcgcgccgatcgcatcgtagtcgaccaggtacttgaaggcttcctggacttccggcttcttcaggttctcgttcttggagttgaggctgatgaagtaaacggtgcccttcggcgcgctttcgttggcgagatcggcgttcttggcgacggcttcgaggtcgcccggctccaggttgcgggcgatgtcgatgtcaccggcctcgagcgccaggcgctgagccgagctttccttcatgaagcgatagatgacgcgggcgagcttggccttctcgccgtagtaattgtcgttgcgctcgagcacgaccacttcgttggcgcgccattcgcgcagcttgaaggcgccggagccggcgtaaccggtctttagccactcgttgccgaaatcgttgtcgtacttgtagtcggcggacggcgtgaccggcttgacgtgatcgagaaccagcttcttgtcgacgacggaagcaaccgttgccgtgaggcaattcaggacgaagctcggcgcatagggcttgtcgacggtgaaggtgaaggtgttctcgtcggtcgccttggccttttcggtgacgttgtcaccattgatgccgaactgggtgaggatgaaggcggggctcttgtcgagcttgacggcgcgttcgaaggaccatgcgacgtcttcggcggtgatcgggttgccggaggcgaacttcataccgggcttcagcttgaacgtgtaggtcaggccgtcatccgaaaccgtccagctttccgcgaggtcgcccttgaccttggacgtatcggccatgtcgaggcgcacgagcaggctgtaggtgttgctggtcatctcggcggtcgagagttcgaaggcttcgcccggatccatggtgatgatgtcgtcgatcgcgaagccctggacgagggtgtccttcggggtctcggcgaaggcggcgggcgcggccatcatcaggagggagagtgcggcgccggccgaaagcgcacggacgttgcggccaagtctggtcatcatcatagtcttgttccccttgctcatatttttgaattcaatcaggcatgtcagcagtgtcaggcagcctcttctccccatgccgaagacagaatccgaagccagttttcgctggccatttttttcaaatcctcgccaccatatccagcgcgctgaagcgcatcaatcagcttctggttgccggcggcgtcgccgatttcgtccggtatggttgcgccgtcgaagtccgatccgagcgccacgcaatcgatgccaatgcgctcgacgaggtagtcgatgtggcgaaccatgtcgctgagcggcgtgtcgccgtctgatcgcgcatcgtcgcgcagcatggcggtcgcgtagttgaggccgacgaggccgcggctttccttgatcgcatcaagctgcctgtcggtcaggttgcgggcgaccggtgtcagcgcatggacgttcgagtggctggcgaccagcggctggtcggtcgtctccgccacatcccagaagcccttttcggtgatgtgggcgagatcgatcatgatgcccaggcggttgcattcgcgaaccagctcgaagccggcgtcggtcaggccgaggccggtatccggcgacatggggaaagcgaacggcacgccgtggccgaagatgttgtgccggctccagaccgggccgagcgagcgcaggccggccgcgtagaagacttccagcgcggccagatccgacccgatcgcttcgcaaccttccatgtgcatgacggcagcgaagacgccatcggcgatggattggcggatgtccttgaccgtgtggcacagacgccaggcgccggcgcgatcgagacgaagggcgatcgcggccatttcattggcgatccgcagcgatggcaggggatcgaggggggccgccagcggggtgatgtagtgtccgtccttgtcgggatcggcgaaaaccagatcgcccgacggaatgtagatggcgcaaaggccaccggcgaggccgccagccctggcgcgtggcgcgtcgatgtggccggtgtcggttccgttcgcaaactcggcgatggggtcgccgccctcccgctcatgcgtccagaggcggagaagaacgtcgttgtggccgtcgaatacgagttgcatgtcagttcctgtgggccctcatcccagagccggggcgggcgaagcgaagcgcgcagaatagaaaagctggcggaatacgccaccccttttttgagattatttttgagcagcaacccatggttaggtgtcgcacggcggtcttggcggggcttgccaaaaacaccgagaatgacaccgtggccgatgaaaatcagatatggcccgactatatgatatcgcgcaaacggtggccgatcgtcggccctggtggagagcgcaatgtctatctcaatttatcgcctgacagtgcctgtatttcagcgtggcctgacaaccctatccgcttatctcgacaaggcggaggccttcgccagcgagacgggcatcgatcccgtggagctcgtcgccacacggctggcgccagacatgctgccgttttccggccagtaccagcgcgccaccgatagcgccaagcttgccattgcacggctaacgggcgccgatgcaccgaaattcgaggataacgagacgacgatcgctgatctgcgggcgcgtgtcgctaaaacggaagcctatctggcgaccgtttcgccggatgcgctcgatggcgccgaaacgcgcgaggtcgtcatctctcccggtggccacagaacggtcttccgtggcgacgactacgtcatgagcttcgccctgccgaatttctatttccacatctcgatggcgcacgcgatcctgcgcaacaagggcgcgcagatcggcaagctcgattatctcggacgtttctcctgacgcgcgctcagggccggtgtcgaaccggcccattctccgtcagttcggtataggccagggtctggtcgaggtggcgggcgcgcagcgacagcagcttttcagcataagcgagccgcgtcgacgcgtgcgccgggtcggccgcgacatttcgcagctccatcgggtcgttcccgagatcgaagagcaacggcgccagaccggcaaaatgcacatatttgaagttctcgtccctgatgacggcgagattgcattcgttcgatcgcaggccgaagtggcgctcggcatgctggtgagcgatatcgcgaaaatcgaactcccagaaggccgcatcccgccagttcacgacctccctcccctcggtgaagggtagcagcgactgcccgtccaggccgttttccggctcgacgttcaggcgctcgcaaagcgtcggaaagatatcggcggcgctggtgaagtgctcgaccgtttggccacggtcggccgatcggggatcgcgaatgaccagcgggatgtgatagctcccgtcaaagaagccgcccttgccgaaggtccagtgatcgccggccatctccgcatgatccgacgtgaagatgatgacggtgttttcccaggcgccggcatccttgagcgcggcccagatccggccgagctgcgcgtccacctcggcgatcattccatagtagatggcgcggatcgccgcgatgtcttcttcgttccagtcgtcgaccgggcctgtcgcgccgtggatgaagctgcccttgtcgttgcgcggcatcgcgtaggcgagataggggtgcaacgcctgctcgccctgtcgatcggtcgcgcgggagaaggtgggtccatccgcaggcgaaaacatgtcgctataaggtgccggcgcggaaaatggcggatgcgggcgcaggaaggatatgtgtgcgaaccacggcctgtcctgttcgccgagccatcgaatgaactcgccggtcaggaatgccgtctgcgtttcatccttcgaataggcggttggggcgttggaaatctcgccgggcgtggcgttgacgggggtatgaatgtcgcggctcgtggcatcctcgtggccgcgcgagcgaagccaggacagccactgtctctcatgttccgggagcagttgccgcgcggtgaagccggggagcaagccttcataggtggtcagatgcggatcgttggcattggtgccgcgcggatcgggcgcggtatccgtgtagccgaacaaggtcggctcgtagcccgcgcggcgtgcggcgagcgccagattgtcgaacctgccatcgaggggcgagccgttgcggcaaacccgatggttcatctggtagagaccggtatagagcgtggcgcgcgccggcgaacacggcgcggcaccagcgaaatgacgggcaaacagcgtgccctcggccgccagcgcatcgacattcggtgtcctgacgcaggcgtggtttcgtgccgagaggcaatcaccgcgccactggtccgcggtgatcagcagaatgttcggtttgcccgtcatcgatctggccaatcagtgatggttggatttcgaatgccagttccaggccgagcggatgatctgggagagatcgtgctgcggcacccagccgagcacctcgcgtgccttgtcgttgttggcgaccagcgtatgcgaatcgccttcgcgccgaccgacatactcgacggggaatggcttggcggacacgtcctcgatggcgccgagcagttccttgaccgtcgtgccggtgccggtgccgagattgagggcgaccgattcaccgccgcgcagcagatgctcgacggcgcggacatgcgcatcggcaagatccagcacgtggatatagtcgcgcacgcaggtaccgtcgcgggtctcgtaatcgctgccgaacaccttgaagccgtcgcgccggccaagcgccgcgtcgatcgcgagcgggatggcgtgggtttccggctgatgccactcgccgatgcggccttcgaaatcggcgccggcggcgttgaaatagcgcagcacgaccgagcggaagccggtgtacttgtcgtaatcggcaagcgcctgctcgacgatgtatttcgtctggccgtaggggttgatcggcacctgccggtgcgtctcgtccagtggcacgctttgcggcaggccataggtcgcgcaggtggaggagaagacgaaagccttgatgccggcagcctgggcagccgccagcaaggtcagcgtgccgatgacgttgttttcgtagaaggcgaccggatccttgaccgactcgccgacctcgatcagggccgcgaagtgcaggatggccgcgggcttgtgcttggccagaacctcgtcgaggcgcgcgcgatccctgatatcgccttcttccgccggcccccatttgacgaactcgcggtgcccgttggagaagttgtcgtaaacgacgggcttgaagcccttgttggcgagatcgagacatgtgtgggagccgatatagcccgcaccaccaacgaccagaactgtttcacctgccatgcaccaccttctgtgatttggaatcggacagcaccagagttaggccaacgacatggcgataaaaagaacgaagtgggctccctggcgctttcaccgcatcttatggccaacgcgattaccgattttcaatcgccgagatcgaaggccgatcgaacaaggactattcgcctgcgatgcatgatcaacacatgaagacccgagaatattcccggaggtcctgatagaaactgtaacttcgactgcagtgatactgccttattttagctttcatgcatggtctatgctttgagttcctgtccaatgtcgtcgtgcttggactaatcgacttcaaagatatctggaaaatcatcgcgcatggatgcagctattcgcaagttcatctttcatgatctccaaacgatcgagggttacatcgatcctccggatgctctggtgttcctcgcgatcctgcggcaccaagctctcgcgggttttgaaggcgcggtcgcggagatcggcgtctattacgggcgatcctatttcctcttccggcgcatctgcggcgaccgtgagccaatcgtcgccatcgatcttttcgatatcgacggtgcaacgaagggcagcgcgcaatatctgcagttcatcgagaacggccgccggctcggccttcctgtgatggaagatctggtgatcaagggcgacagcacgcttctgaagccagccgacatcttcgcgaaggtgggagcggtgcggttcttcagcatcgatggcgggcatatgctgcatcatgtcctgtccgacacgcatctggcggcggatacgctgaccgatcatggcatcatcgccttcgacgacacgttcaacccgacgtggccggaggtgacggtcggcgtcgccgacttcctgcgcgagcagcagggcgagttcg

SEQ ID NO: 42 - DNA, 32531 bp, Rhizobium matallidurans
  source 1..32531: mol_type = genomic DNA
gctacggggcacgatcctcgatagtgatggcccgcggcaagctgccacggctcgcgccgcagcggagctgcggctgacgacgcggcaagtctacaatctccttgcccgttatcgcgcggatcgaacggcgacggccctgccgccacgcgccgccgtcagccggcgcaagcgactgccccaacagatcgaggacatcatcgacgcaacgctgcgcgaggaatggctgacgctcgaggcgcctccactcactcctgtcgttgccgagatccaggcgcgctgcgaggaagccggtcttgccatgccatcctatgtcacggtcgcccggcgcattccggcattattctcgcctgaagagattgcgaagaagcgctcatccaatccgaagcacctgctgcgcctgaagccaagaacgggctatatccatgcaccgcctcggcgccggtggcctcgggcgttcggtattgcgttcgacattttacgcggacgagaacccgatgcccacgccgccgaaaaccgtacgcggctcaagctgcacgtctggacgatcgtggcttttctcctgggcggcatattgggtgtgatcgcctatcgccaagtgggtggatatctgttgctggtctgcgcggggctgctgtttgcgatttctctcagcgggatccgacacggacgcgggacctttgccaccacagcaaccaggcgtctccggtggctaccgcaacgccggcaatgaggcctcgataacgcgagaggatttgaagcatggacgcctatggacacttgcgagttctcgtcagcctgatcctcgggctgtcgataacccgcgtgctgtccggtctgtctcgtcgcctgcaggagccaggaaagaccgatagaatgcatgcgcagatcgtctggtcaatggcacttctgcttggcgccgtccatttctggtggtgggagttcgcgcttcgcctggtcgagacatggaatttctggatctacattttcgtgcttgccaacgcttcgttgtttttcctgatgtcgacgccgctctaccccgaccatcttcaggaccatggtgacagggaggtgtttgtcatccgaagacggcacgccttcttcgccctctttgccatatcctttgctttcgacctgatcgacacgctcatcaaaggacgagagcacttcgcctcgctcggcgtctggtacatcgtgcgtggccggggccgcgatcgctctgtttgcaacgagaaccgacgacagccgcaagctcatgtggcccgggctggtctggctcgcggggagcgtcctgtggatcaccatgctttacagtgaattgctctgaaaagttctttgtgactgctctcgaaaccgggcaggcggcgtcctggtcgttaagtgtccatctcgtccgcgggtcatcgaacctatgccctcacattctgattgaaacctgttcgcggtggctggagcgcggcgatcaggataggacgtcttaccgacattgcgctctgtacggtcccagagttagagcgtcgtcctccaagcgaaagcgctttgggggagtcggcccccttcatccgtatgaaatcgggtgggaagatgttcagtgccgacttcatcccgttgcccttcgcttgaaatttgaagctaaagcttcacccgaaactggttccagggttgggctcctgttttatcgatcttggagtaacgctcgtagggcctcatgttcaggcccgttgggtttcagatcgaggaaggcgtcgaccgaccttcgtgtttcgtgcccgcccgacgccggattggcccgatgaaggacaaaggcactttcaggcttgctctgaccgcataggatccagcagtcgccattggagctcgcggcgaattcgatctgctcttccggttcacagcttttctcaacaggattcatctcgtccaggcgatgcgcctgcccgtgcgagatcgttccttgatccatcggctcgccagggcgtcgcgtatcagctttgattgtcggcgcgggatagccatccggtcggatcatgccggatcggatctgctcaatgagagtgctctccgccgcgtggttcgctcccgcttccggcttcaagtcaagcgtcgcgtaatcagctcttttgagcagctttcgaagaagagactgtttcacgccggttatactcaccatagccaaccctccgagattaggaacaggatgaagacgaagcttgtaacggcgacagctacaggagcggcgctggaagggcttggccaaaaatttttaaaggtgagaagcatcgtctctttccgtgaaagcgtcgtccaagcagcggttggtccccgctgatacgcccttatcacccaacctatggtgctgatttccggcgccgagcaggacgtatcggtttcagctcgatcggctgcgcttcgcgcaactggcgcaggcgctcggttttgcggatccggtcggccgcttccgtttcaatgatctgtcgcgcgacttgactcgtggtcgcagccttatcgcgtgcggagattttctcgggcttgaacaactcctgcgtcgtcgtggtcatgataattctctttcggtgtgtagctcggacgcatccgagacgtcgacggtcggatcgaagcgggagacgaggccagccaaacaaaaaggccgggcgctaacctcgacctctcatagtcactcagctctgctgccagtacatccgtggtcagcgaggcgaatgaaaacttaagccgcctgaagattttcggcggagcttttgcgggacttgcggtcccgaacaacctcgtaggagatcttctggccatctgagagcgaacgcattccggcgcgctcgacagcggacgcatggacgaagatgtccgtgctaccgttatccggttggatgaagccgaagcctttggtggagttgaaccatttgacggaaccagtcgtcatgacgatctcctttcagaacaatcgttgtggttcccgcgatgccttgcgggataagatcgatgatttgagaggaaatccgacgggagcgaagctccgaaccaacatcacaagcaatggtcgataaacaatatatgggcacaagttctgattttacaagggcgcgccggatttatgttctgcccatggaaaattcaaccgctccgtctgttgctcgcaccgtcaagcgattaaagcgatgtccacggcgacatccatcgacacgaacgcatccgcagggccgataaacgttcccgacacaggcataagctgggtaatgtcgcgtgcgacggccaccgggatcaggtttgcgctacccatgctcctgttcgtcggatcgaacgcgatccatcctgcacccgggaggaacacttcaacccatgcatgggtcgatccgcccggcgacgaaccgacgagggttctcactgggtcgtggagatatccggacacgatcctcgccccgaggccaagaacccgcacagattcggcaaagagtgtcgcaaggtcccggcaactcccggaccttacgcgaagggtttccagcggagcctgcgtcccttcaatatctcgcccctgataggcaacgccgttcgcaacgccggcactgaggtccttcaacagcgacagcgtgtcggtcgagttccccatgacgaagcccatgacccactgatgcagttcaccggaggggtcgggatattgagcatccctgagagaaccaagatccttccaatcctgatcgtcgtaaaggaaagggtaggtggcgcccgacgcggcgatgtcgaacaccggccaggcctgcgatttcaggtcgacgtcggcatggcttacgatctccagccggcgtgtcggctccgagaacgtcagggtcgcaaccgcgtttccgaatacatccgtcgtccaggccaccctgccttcgggcgagaccgtaatctggtgatgttgcagcaaaagatccggcccttcgcgcggtcgcagcaatagccgatagggcgtgagttggacgggaaaccggtagctgtaggtcgtccggtgctttatggaaagctctgccatttacgctcctcgcgcagaaggaccaaaagcgcgcatgtgttcagggatggtttctccctcggggcagccaaggaaatctcatctcataagcccggcggatcgcagcgcgctctcgatgacatcctggacatagttcgtcacatccttgcggtcatcgcttcctatctcgtttgaggtcgtcgccctcccatcaggttggacccgacgctcgaaggagggcgtgagaccccaactgcgggcaatgtgttccgtcgaggagacgccgacgtcgagcatgtagggggctcgcgcgccatagccgctcgacgtgtcgatcggagtgccgtgtcccatgccgcgaatgcggtgaagctcaatggcgtccgcgcctgccctgtttgtccaaatgtgatgttcatgtccatccatagcgtcggaccgcgccggctgatcgccaacctcgtgcatagccttccactgctcaatgatggcccgtgcgttcaactcatcgacggtcttgtcggccgtaccgtgccagaccgatatcgtgggccacgggccaacatgcggcgatgccgatcggagacgctcttggagccgttggtgggagggcaggccgtggccccgcatccggtcaaacgcttccgggaccgtggatgcaacgccatagggcagacccgcaatgatcgctccgccggaaaacacctccggataagcagcaagcatagcgttcgccatggcgccgccggctgacagccccgtgatgaacactcgtgctggatcgatgccgtggtcggaaaccatcgtatcgatcatctcacggatcgagcggacctctccgcgatcccgctcaatgtcgctttcggaaaaccagttgaaacagaggttggggttgttctggcgggactgttcgggaaacagaacggcgaaaccgaattcgtccgccaatttcgaccaccctgatccggcatcgtagccggccacggtctgggtgcagccatgcaggacgacgacaagcgcaagcgggccagatcgatcgccgttttcgggagcatagtaccagccgaggaggttgccgggattagcgctagcgatctccagctgcgttagtctggttggagccgcatccatcaccggaatgtttctgtatcgttgcaagcgctgcaatgtatccgaaagacttctcatggagcatcctcgctggtcgcggaaggccaatcgacgtcccggatgtcgtaggtaatgctgcactgcacaattgcaagtgccgaacgtcggatagagaagccgagcccactgcaaacgccgcatgcaactggcagatagggccgttatcacgcttccttctcggcctggctgcaggaaatcgctgcgtttctcgttccaaggcacgagcctgactgacgccgggctgtcgcgaataccgacaggaccaacgtcggcaagctgaggatggtcgcgaagtacctaaggcagccaatgaatcgctatgcgtcgtcaagatggcgccgaaaagcattatctaaagaatggcccaaatcatcgagcagaacagcaaaaatcacgtcgaggagagctcagcgccggctgacagtgcggaggtggcgccggcggcgcaatgtggccagattagactgagctttccgctgaatcgtttgccgacaggcttctcttgaggcggtgttcatcagccgtcgtctcgctgaagagccaatctcgaaacgctctcagcttccgatgccgaagcccgccttcagggtagactacgtaatagctccatcgggatttcaacgccagatcgaacgggcgcaccaaccgtcccgatgccagatcggctgaaaccagcgcgctgcgtccaagaagaaccccctccccttgcgccgcagcctcgatagcataggccgcggtttcaaatttcacgccgcttgtgtggtcaatgccgtataggcccgcagcctggagccaggtcgaccaggcaatgcggaagttgtcatgaatgagcctgtggtgccgcagatcctcgggcgtccgcaaaggatgctttctttggaggagctcgggactgcaaaccggagagacgtcctcgtccatcaataattccgacgtcacgttgtcgtaattgccttcgccatagcggatcgcgatgtcgattccatccctgacgaagtcggcgagcactccggacgttgagaggcgcacgtcgatatcggggttgggccgatgaaaccgatgtagccggggaacaagccaccgcccggcaaagccatcggacgtgctgacattcagcacgccggacgatcgcgaagcggcggttgccatcgtcgcgacgcttatccgatccagggccgctcctacctctgctgcataagccaggccttccgccgtgagctctactgagcgcgtcccgcgatcgaacagccgcacgcccagcccgtcttcgagatggcgcacagctcggctaatcgcgccgtgggtcacattgagctcggcagcagccttcgtgaagctgagatggcgggcagcagcgtcgaatgcgggcaatgtcgtcaggggcggcagtctacgagccatggcaaagcctgtgagtaacagtcacatatgatcgactattcatcgtttgtcgtccagcggtgcaaggctcaaaatcccctcattacagaacatttttcgcgctgtccgaaggcagcgccacggaaagagaatgacaagccatgatgaatactcactcaaacacaggggactgtggcggtgcgccgtcatctgctcttggcccggcggtttcctccctgctctcgacgatgagcggaatgaccacgggcctgctcttcgctctgctgcaccgcgtggcgatgcggcgcatcgagcggttttcagatcgtcggctcaacgatatcggattcgagcgcgactgggacagctcggtgatccaccgggtccgatcgtccgcaccccgtggtctcacgccctgaaggagaagcgatatgaaagtctacccccatctctggttcaacggacgagccgaggaggccatggaattctatatgtccgtgttccgcggatccaaggtcctcgaacgcacgaaactgcccgacccggaactgtcagtcgtgcggttcgagctgccgggcctgcctgtagccgccctcaatgccaactcgtctatcccctacaacgaagcgttctcctttctggtggagaccgacgaccaggcggagacggactactattggaatgccctcatcgccgacggcggcaaggaacagccctgcggatggctgaccgacaagtttggcgtctactggcaggtgtcgcccagtattcttctccggatgattgccgatcccgaccaggcgaaggccagccgggtgatgcaggccatgtacaagatgaagaagatcgtcatcgcggatctggagcgcgcctaccaaggctaacttctatcgcaacgctccccgacgcaaaactcaacccaaatcacaagcttatggaggctcccatggcatcgcttatggaaagaaagttatcgtaaattggcggcagttccggcattgggctgggcgtggccggcgctgcgctcgagcgcggtgcggaagttgtgatcgtcgggcgcgctgaaggacaagctccaggcagccgctgagacgcttgccgcaggatcccgcttgcgcaccatgtccgccgatatgacacaggaagccgagatgagccgcctattcggcgatatcggcgccttcaccatctagtgtcgacggcgggcgctgcacggttcgaataaggccgtcgggatacaagccggggtgtttgacctgcaagcgttcaagaaactcccgccaagttcgccaaggctccgcctcgaaccattccgggagttcagcagtgacggcgagtagaggatcgggtctgcgccgctctcgcttggctgctggcttggaacgggcagtcggcttcacttcaccgccacgccaagctgcaacggcggtctcgacacacccacccgacacatagccaacaaatcccgccatccgcaacgatcgcaacttgcgctcccagcgcacgcgctgcgccgccgcttatttcgaccaatgtcgcaagggctgctccgccgcgttgcacagcggaggccgcaaaggtgaggatatcgacaggactgtcggtgctgcttaccctgaacgggacgagtatttccgtcataaggacctatcctcgttaattggacaaggtaaaagcgtgagtgcgttgatttcagagggaagtgcccggcttctaaagagccgagccaccaagtcgttgcccataagcaacggtttgctcgtcgatgaacatgcgctccgactgatatgctgctaaaccctcccgaagtgagcttgcccgcaccaagtttcgttgcagggaaactgcatctgcggccgccttcgaaactcccatcgcggtatggggtcgagcaacaaaggccgcgtctccgaccagcgctacggattggccaaccatgcgatcagccgcgtagtcaaagatcgcctggatcgacggcgtattctctgcctgaacggcgagcgcgaacggtgtcggcagcatcgccgcagcatccgcatgcagggcctccacccggcttgttacaatagtgccgcgcgggagggaataaggataggctgttccgtcacgatcggtcagggtgcttgccagctcggcgtcattgacggggcggtaccagacccagttgtagcgcctttgtcccggcgtcgtttcgccgttagggccaggtactaggtagccgagaatatgcacaccggactggatataaaaggcgaaacgatcgatcagaattgatgctcccgaaggaagttcattttcaggcaacagtccgcgccaagcgacatatcccgcatatcggttatgccagtcctcgttgagggtcgcccgaaccaccgagccgagcccgtccgcaccgatcaccaaatcggctttttcggatgaaccattggcaaaaacgatggtagcaccatcgtcggcatcaattacggcctcaacggcacgtccggtttggtaccgtcctttttccagacgtgccaagacttcagagtaaagaaagtcccacgaaatctgcatctgtggcatcgacagcttctgggcgaccgagccatcggcattgaagtagatccgttcgcgggcgatcacgccgacattggcagcgtgatccgcgccgatcatcctcagcatgtgaaagacgtcttcctggggcaccagtcccgctccgcgtccggcaagtccggagtgagagcgctcgtaaacaaccacatcatgaccgtcaatttgcaacagaattgcggtgaacaggcccgcgagcgagccaccgacaacgcgaatacgcaatggtttcatgattagcgtccttcttgttcgctgaaggcagcgcctgagcgtcggttgccgaggaccagaaccaaaagcgcgatgagggcgagcattccacccaagatgctgacgccggtccattctccttgactccacgcgacggtagcgactgccgaaccaaatgagccaccaaggaacatgcccgtcatgaagatggtattcagacggctacgggcttgctggtcgagcgcataaatgaggtgctggttcgagacgagcgcactctggataccgaaatccaatacgatgacgccgacgattagaccggcaatcgcgccccaaagaccgaacaccacccatgcaaccagcgtcaggatagcaccacaccacaccacgaaggacgggccatgcttgtcggcgacgcgaccggcgagcggtgctgcgaagacgcccacggcgccaacaatgccgaacagaccggccacatcggctccaagattgaaacgcggtccctggaggtagagtgccagaatagtccagaacgccgtgaacgaggcaaacagagcagcttgaacgaatgtcgccgtgcgcagcgttggcaagcgtgtccagagatgtgcgagcgagcggagcgccttaccatagggcatgctggaggttgcccggtgatggggcaaagtcacgaacatcaagacggcggcgaccagagccagcggtaccccgatccagaacatttcacgccagccgccgtgctctgcgacaaagccggacaacgtgcggctgaaaaggatccctgacagcacgccggccatgacagtgcctatcgtggcaccgcgcttttccggtgttgccagtgacgccgcaaacggaacaatctgctgcgccaccgtggcgctcgcgccaacgacgagcgaggccatgaccaacatccaggctgtcggcgcaattgcagccagagccaaggcgacagccagcacgacaaactgaccgacgatcagcggtttgcgatggaggatatcgcccagcggcagcaacagaaacaggccgagcgcataaccgagttgggttgcggtcgggatcaacgtcgccgcggactgcccaggaaactccgcctcgattataccgagcatcggctggttataatagatattggcaacagcgataccgctggcggccgccatggccagcaggccgagtttacgggttcctttggcggtcacgtcactgggtaagggtgatgctttcgagttttgtaaagttttcatttcgatgtctctccggggtggtttcttcagccacttttctataatttaatcttaatcagttttagtgggtccgattgtttggcccgaatatcgagactcgttataatgaataccgatgatttgcgcgttttcaccactgccgtcgacgctggcagccttgcagaagcagcccgccggctgggcatcccggccatggctgcaagccgtcggctggctgcgctcgaaacatcgctcggcatacggctgatgcaccgcaccacccgcgcgttgtcgctgacaccagaaggcgaaacctttctgccctatgcccggtcgatcatcgacaatgagcaggaggccacatcgcggttgaggtccgatggccggggcgcgggcggattgctgcgcgtttcggtatccgcggccttcggccttacatttgtggcgccgcttgtgccccgtctgctgatggaaaatcccgagctgcgcatctcgctcgacgttaccgacacacttcctgatctggtcgcgactggtatcgatctcgccatccgcattgctcatttgcgcgacaacagcttgatcgctcaaaaactggccgacaatccgcggcttctggtagcagcacccgattatcttcagcgacgtggccagccggctttcgtgggtgatttggctttgcacgattgccttccgcttaacggcattagtcattggacgatgcgggacgagagggcgccggaaagtgagcgggaaaaacatatccgcgttcatgcgcgtttttcgtcgagcagtattgccatctgccatgccgcctgcctggcgggcggcggcattgcgttattgtcgcactgggccgtccgcgatgacctgcgggcgggccggcttgtggctgtcactctcgccgacggcgcgccagagaacatgccaatctgggcagtgtatcccaccacgcggctggtcttgcctaaggtgcgggtattcgtcctggcactgcaggaagccttcgccgcctatgctgatcaagggggccaagtcgcaacttgatctgctagagggttacaatcgcggctcttactttctcggcagtgatcggcatgtgagtgaatctgacaccggtggcatcagccagtgcattcgcaagtgctgcggaagctgggccttgtccacactcggctacgcccaggaaaggctttcccggctgctgctggacggtgacagcaatcttttcaggtacgtcgcggaagcgtaaaattggataggtgctccaatcgaaggctgtgcgcagagtgccgtcattgcccgatgcttcgcgggtgcaccagctcaacgattgaataatcgccccttcaacttgattatggacaccgtccggagaaacaacctcgccgcagtccacatcagcctggacccttcgaactgtcaggcgacccgtgtcgcgctcgactgtgatttccatgaacacggcgcaataggcgcccagatttttgtaacgcgcgaacgccatgccgaacccttgcagcggcgaagttttcttgcgagttttccagccgaaggcttccgaggcggtcagcatgacgcttcgtgctcggtcgtcggccatgtgagccaaccgcatatccagcggatccactccagccttcaacgcaagttcatcaaacatgctttcgatagaaaacacgttcaggtgcgctccgagcgacctcagcgcggaaacccgtatcggcatgtccttgatgaagtggtagatgacatgcatgtttggcaaatcgtagagcgggttcgagttgcggctgccgtcgccttccggcattgggatcggcttgccctccggaataggaaacgattgcgccacctcgtttccaacaagcacgccgcccgccccgaccggccggttgttgtgaggattgctccagacatcgtagttccatttgacgatccggtcgccggcatcgatggcggcgtcgacttccgtcaccattcccggaccaagtggttcccagccgaactcttgctctcgcatccattgtaaccggataggcttgcccggcatcgatgcggcaatcagggcagcttccgcagcaacgtcatccgcgccgttctgtccatagcaaccggcgccttcgacgtggatggcgcgtatggtttctatcgggcgattgagaagctccgcggccacacgcctgacgtcaaacgtcccctgactgtgtgtccatattgttagctgatcgtcttgcagccatgccaacgcgcaggagggtccaatcgacccatggctgatccagtttctggtaaaactttggctgacagaatgcttggggtcagcagtcggtgtactcgtatccagtatgacgatgtcgcgtgcaggcagcgccttcaatgtctcggcgactcctcccgagggaagaggttcgttcgcggccgtgtacggtaaggcttgcagtctccgcatcagcttgacagcatcccactcgcgccgggagacgactgccgcaaaatcgccgttgcggacaaacttaacaacgccgtccatagcttcgatttcgctatccggcggaagcttcagccgtgtgcctatgcttggaccgcgaatgacccgggcatgcagcattcccggcaggcgcatgtcctgtatgaacgcctcccccccggtcgtctttgccgggatatccagcctcggtaggttgaaacccatcgtccgaaactggcctttctggcgaagaggtgcattgggcagcgcttccacatgcagcgataccgccgcggcaatctcgccatacccaaggctgcggccatcggctgcgacaatggttccattcccctttgtagcaacatcggcctctgcgaccccgagcgttgcggcggctttcgcgagcaggagcatgcgcacgtttgcagcagcgttgcggatcgcggtgccactgtcctgcatggaatgactgcctgccgtcagcccttcgtccggtgtgcgcaatgtatcgaccgtaacaagtgtgactttggaaggaggaagatcgagttcttccgcagctacctgcgtcaacgctgtccgtattccctgtccgagctcggccttacccgtgaagacggtggctttcccgttttgatcgagctgtatccaggcgtcaagatagggccaggatttcaggctgcctggcaggtcggcattgacaatagccgggccggcgcccccttctccgcctccggccaactgggctcgtgcaggtcttgcgagagcgaatgctaccgcgataccgctggccgccagaaaagatcgtctggtgatcgcgctcatctggccactcctgccatgacgtcgctggcgcgccggacggcgcggaggatcctcgcatgggtgccgcaacggcagaggttgggttgcagatggtcgcggatttcatcatcgctcggattggggatcttgtccaaaagggtctgcgcacgcatgatcatgccagcgatacagtaaccacactgcgcggcttgctcatcctgaaacgccttttgcaaaacgcctggagcgtcgacagagccgaggccttcaatcgttcgaaccgacctttcgccaatcgcgcctagcggagtgaggcaggaaaagactgccttgccgtcgatatgaacagtgcaggcgccgcactgcccaagcccgcaaccgtatttggcgccgttgagttccagatcgttccgcagcacgtaaagaagcggtgtatctgtgtcgctatcgacctggtgtctctttccgttgaccgtgatcgatgtcgtcattgtgcgttctccttgcgaatatcgcgaacggtgtcttcaagaggcggccagggtggttgcgttgtgaagcgcgatcggccgtaggccagcaggtccgcgatctgtctatcggtgagattgtcggcaaacgacggcatgaacggagcgtcgctggacggatcccttatgccctgcaggacggcctgaaccgcattgcgggggtctttcgcgttcatgtccgacgtctctgaaagcagcgggcgcccttgcctgcccatcggcgcggatggctcgtgacatccgccacacgcaccatcgaacaggtttgtccgagcgtccggcagcccagcgatggcgggcggcgtcaccgtcgaagacggcgtggtaccggaatgaattgtcgtattgatgtaaacggcaatcgcccgtacgtcggcatcgttgagcctcgacaggccctcggtcactggccccatcgggccagctgccgtgctgtggcccttcgcagtcccggttttcagataggcttgaagcgtatcgacgttccagcgatcagctgacgggttggaagcgtccagaggtggcgcgttccaaccttccgcaacacccccagcaaactcgtccgcccacttttccccgcccaggatgtttcggggcgtgtggcaacctccgcaatgggcgagcccgtcgaccaggtattttccacggttccattcgctgctttccatgggttcggagaccgtcgcttcgtgccgcagaaacaacagtttccagccggcaagaagtggacgaaagcccagaccagggagaagttcgtttggaggagcgctctccttgaccggctcgcggctcattagaaacgcgtagatagcatcgagatctgcatctgtgacgcgcgtgaaatgttcatagggaagtgctggatagagatggctgccatcgcgggcgacgccctccttcatcgcgcggcgaaacgcatctgccgaccagttgccgatcccagtttcaggatccggcgtgatgttgttggaataaagagttccaaatggcgtagtcaacggccgcgaaccggcaagcgccgggccgtcatcggcggtgtggcagacgatacagtcgcctacggtcgccaactgctcacccttgcggatcagagccggcggaatcgaagcccgatcagggggcgggattctcgaaagttccggttcgtaggcgatccacccaaagaccccaaagcccacggtgatcgcgaggccaaggattgaggcccccgcctgcagtgtgcgtttactgtaatgcatatggacttgcctctgtattacgaatgcaggcgacgatctgtctgacagcatcgctgtggcaggcgcaaagactgagcgcaccgttgcctcggcatccatgccgtcatccagaaatcgatttgtgaaggtttaacagcctcggcggatggcgaaatcgcactttggtttgaacgacctatacctcggtttaggaccgacctcgctttttcagtcagccgtttcccgcaccggtttcggcagccgcgtggatgagggctggatagtccacatatccgcgactgtcgccgccgaaaaacgttgaactgtcaggctcgttcaagggagctctcgtgcgcaagcgatccggaagatcagggtttgcgatgaacagccgtccgaatgcgataacatcgccgcgtccctcggcaattgctgcctgggctttctcgtaagtgaagccacccgccaaaatcagggggcctttgaaccgctcgcgaagcagcttcatgatgctgtcccaacgagggtcgtaattctcatcgagaacggttccgacaatttccggctccaccagatgaagatatgcaaggctgcgtttgctgagctcttcggcaatgtagccaaatgtttcttccggagtgtcgtctcccatccccatgaaacgccccattggcgtcaaacggacacccaccctactggcaccaatttccttggagattgcatcggtgacttccagaagcagccgcgcgcggttttctgtcgagccgccatattcatccatgcgatgattgctgttgctgttgatgaactggtccaagagatagccgttgcccgcatggatctccacgccgtccataccggcagcgatagcgttccgggacgctgtgacatagtcggcaatgatcgtcttgatgccacttgtggtcagttcctgcggctccgggatctctccccagacgcccttgcccgtttcatcaacaatgaacgtttttccaggcaccggcattgtggtcggggccaccggcagcccgccgttcggttggaagcttggatgagagacgcgtccgacgtgccagagctgttggaatattaccccgccctcttcgtgaacggctttgctgacctcaagccagccggcgatttgctcaggcgtatagatacccggcgtccaggcgtaaccctgtgcttgctgcgagatttgcgtcgcctcggtaatgatcaggccggcgcccgcacgctgacgataatattccacattcatcgtggtcggcacgttacctggttgcccggcgcgagaacgggtcaggggtgccatcgcaatacgatgacgcaaggttagccctgctatttctataggagaaaaaatgttggcgttcacggctttgtctttcaatttgaagttttgatgcatggcccgagacctgcaatctaacttcacaacgatcgacgctgtagtggttataaatgatcagccggcatatcggtttccgttacaatgatgccggtgccccttttcagtccgacagtaggcaccaacatttccctggctctaaccatgccggcagtcgcgtcggaaagaaatccggcctatgaaacaccgatcgcgccgattgacagaatcccctcctttgccgacaggcaaattctgcctgcccgttttcattggtgatccatactatagctggccgatttggagcggtggtgagggcatatttgacatgaataactctttactcgctttcacttcggggactcgtcgagcaaggtgcgcgccagcggcacgacctttgatccataaagttcaatgctctgcataagtttgtcgtgatccatgggaccagcagaatacttcatctggaaccgtgatatcccaagcgtccggacggtggttgcgatcttttgggccacggtctccgccgatcccgcatacagcgaaccatgttcgatctcgttctcaaaatcctgctcggtcaccggcggccagccacgttccttgccgagccggtcccggatcttcttgaaatgtgggaacaggtcacggcgagcctgctcatcgctttcggctatatagcctggtgaatggacgccaatagcgccgagcgttctcccagcttggtcggaagcctttttgtagagctcgacatagggcacaaaccgggctggatcgccaccgatgatggccagcatcagattcatatcataccggactgcacgtatgacggactccgggctaccgccgacaccgatccaggttttaagccgaccgtctccgatgggcggatagatgcgctgatcctccagcggcgcgcgccagtcaccgcgataattgacgacgtctttggagacgatctccgagaacagatcgagtttctctttaaacagttcctcgtatttcgacaggtcgtagccgaagagtgggaaggactcgataaacgaaccgcggccgagaatgacttcggcgcgcccgttcgaaatcgcatcgagtgtcgagaaccgctgaaacacacggatcgggtcgtctgaactgagaacggtgacggcggagccgagccgtatcttgctggtctgagccgcaatggcagccaacaccacctccggcgcggagatggcaaaatccttgcggtggtgttcgccgacaccgaagaagtcgatgccgtgccggtcagccagaactgcctcttcgaccacattgcggatcacctgcggctgcgcaagcaggtctccgtcagggcctgttgtgacatcgccgaacgtatcgaggccgaattccaagggttgtgtcatgatatgttccaatcggataaaagaagacgttgttagcgcacagctgggagtgacgatgagggcgagccggatcctgctgacgaggtcgcatttttcgtccacggccactggccatcgatctcggcttcaagggaaaaactgagaaatgtccggatgagcacgatcagtccgagaagtccgacgctttcccaggtcagtggtgcgatgatggtcgctatgatgtcagcaccgatcaggatctccagtcccaacaagatcccgcggccgagattggcgcggtagcgctcataggcctcgcgttggtcgatcgagaagacatccctgatgtatccgacggttgcgaccagaacgccgaccaggatcacacccacgccgaagaattccagaccggtagccaagggcttgagaatgggtgctatcaggttggcgataccgcttgcctcactgccgatatccatgatgatttcctcttcaattcaacagagcagaagctggtaaggtttcaggattcggctgccgcgctgcttgcaaacagagcgacgaccgctatgacagcaggcagggtgaaagcgacagcgggtgcgtacatgtagccgacggcaccaaagccgcagccaagggcaaaagtcgccacggcagccgccatcttctttatccgcgccttggccgttgcaacctcgtcggcttcggatcggccagaatgtcggcaagatccagcatgatttgcgtggtcgtgccggtcatcagtgtcgatggcggcgctttcgacagatgcgccttgtgaagcccgttctgaatggccatcgcggaaaccagcgccatgccgaccgtaagagtggcgacgccttcgtctgcccggaacggaccgtgatagagcgcgtaggcggcaacgccgacgaatagcaagagcttgaccacaagcatcggacggatcggcgagcgattttggctcggcagtttcaggcagaccagccgtgaggcaaagacgaccaggcagaacaccggcagtgccaggagttttgaccatgcgccatccagaccgtgcgccatgcttgcgccaagcgtcacgaagttacccgtgacatgcgcggtaaacaggccggacagcgacaggaagccaagggtatcgacataaccgccgttgaagctcaggagggtcggaagggggggagttttcatcgctgttctcttatctaaaatctggtatcgcgatgttctgtctcgcgatatgccccagttttgcccgcaaatcctccgttcaacaattgtatcaatagtttcgaatttattgcgccgcgcgacataatgaaaagggcgaccgaagccgccctgccatttgttctgatgctggtatcgttatgcagcacctggccgattgatcgtcaggaaatgacggacgaccggcttttcgggtccgacatggtaggtcagaaccttgcccttcaggtcggcgtcggcattggaaacccgcttgtgctggcgaaggtgctcggcccaggattccaccatgaaccattcgacgatcttttccggatcggcactgtcttcggtgacaccccatccataggctccgtcgcggcgccgttcctgggagagtgtatcgagcgcatgcaggaaggcgctgcgatgctgcttctcgaccttgtattcgatcaggatcaggaccggaccacgatcatgggcaaaagggctcggcaacgagcggctcgggccaatggttggacggtaccatgtcggcatcgccggccggaagcttgatacggtgcatgatgaagcctgccacgagaagaccggccgcaccgatgagcagggtcgtctggatgccgaccgccgtaccgatggcgccccagccaaggctccacgaccacgcacccagttcgggagcacagcctgcgcggcgccattcagtgtcgtcagcgcggtgatccatgcgccaccaaggaagagaagcgcaacgatggcgacgatctttggcggagcgagcgccgcggggcttgttgggcaacagcggtgtcgaccattcgtggtccgtcagttcgtagcgacgacgcgtcatcaaatgcgtccttattcggaagccttgaacaacgacaggcgatagacaccaagcattttatgagtttacgccgtacaatccaatgttcccgacgtaagccgtgaggcatgctcccttttttcaatttcgaggtcaatcgatccaattggctgcgggatttcggtcttacggaaaaagagacctgacgtcgtgatggaagccagcgtgttcggttgcagcgaaatcgtttcgacgcctctcgtcagctgcagcctacctcgcggtcaggtcgagagccacgccttgttggcgatgagatcgccaacattaacatcggaccagttctcttgatccagcgtgaacttggcctgattagtggtccgggccacatgccagtcgtcgtcagcggccttcgccgcgttggaaagaaatatgagtttatttaaaacataacgaaaaacaacgacatggacctcccctcaaaattaacggggatatgaccacatgccgcagttgagattaattatagaaacttcagcttggtgtgagaccgtacgaaatagtcggctccgacgtgagcgtggtctttgaacctttaacaggctgttgaagaagtcagtcgcgttcgcacacgaagccggaatcgtctccgttgtggatatagatatgcccgacaaggcgtccagcggagccaagtgctacccatccgcgaccacagaccgggtcattctcgtcttgtctttcccacgagaactccgcacaggctgatccacttcgcgcgctataccggacatcgagaaagcccttgagagcaacgaatgcgatttcgccgtcggccgtgccctggaatgacagatgtgcctcttccacgagatcgagcgcgtcattgtcccagttgtccatctcgacgatgcgccaacgaccggcaaaggccctggcgaaagcaggaactctcgccatcagcttgtctccgtcatgagcttcggcagccgcacaagattgtaggcggcggccgcgaaggtgaaagcccatccgacgcggccgcgcccgcgcaacttcgtcttgtcttgctccgcgacggttttgatcccgccgaacgcctccgcgatgcgcttgcccatgcgcaaggtgaccccgtagccaggatggcgcgtcgttcgtccgtcgatagccgagcggcgaccattgacgttctgcgcgacatgcgggttcaccttcatcgaccgaagatcttcgacgacgtcctttgtgtcatgggccctgtcggcacccagcgtgatcgctttcgtccgcccggtgaagggcccgatcatgtgcggcgacgctacccgttcagcataaccgctggcctctgttagtcgcgcatcgaccagcaggccatggcggttttccatcagcccgtgccccatgaagcacatcttggcctccttgcctttgcctgtcctataaagctttgcatctggatcagccgttgaagcatgcgtctcgttcgaacgcctttcgccatgaaagtctgcttccacattccgaccgccgccatccgatggtccgcccgagccattcctcggcttgaagctcttgatcgacgcccaggcttcgatcagcgtgccatcgacgtagaagtggtccgttgatggtagccactctaccttgggcggcgaaagggtcgtacccaagagcggcgatgtcgcctttcagcaaccggtcgcggttctttgaaaagaaccgaatggttccgagctggatcgtcaaagccaatctccacaaaccagctgaacacaaggtcgtattccggccgttccatcaaaagccgcttcgaacggcttgaatggaaggctcgcagaagcatggagcgcagaagctgatcaggcgcgatcgatggccgtccgattgatgaatagagccccgcgaactcccgctcctgcgaaacgagcgtgtcgttcacgatctgccggattgcacgcagagaatgatttttacgaacccgatcctccagatcgacatagctgaagagttgacctgtcctcgcattgccgccgcgcatccatcaactccaaatagccataccgagagtgaatcacgacaagagcatatatgccagcgcctttctcaacagcctgccagttttctactcggcgactcattgcaactagcgtcgaggctacgcggagcgtcgcttattcagccatcgcaagacacgtatctcttcatcgtccagccaagtgagtagtcggatgctcctcgttttcaacttgaaaatgtccttcaactggcccgcttcgaaatcttgaaaaaccgcggggtgtatgtaggaggagcggcacacggaccgagtgtttacaagcttggcggccacgtgatcgatcgcttcgttcacctgacgagccagcgctcggttggtggtagccttctccacaccggcgagggcctcaaccgccatgcatgtcgcgccccaggttcgaaattgtcgggaggtgaaatcctcgccagcgacttccttgatgtatgcattcacgtcgttggacgatatctgccgacaacctccatcgtcgcaaacgtactggaagagatgctggccgggtagttcctgtagtttccgcacgacattggcgatccgtcggtcgctatgagctaaattccattcctttcccgatttccccttgaaccgaaacctcacgctgcctccttcaacgttgacgtggcggtttctaagcgtcgtcagcccgaacgacctgttcgtctcggcataggcggcgttgccgacccgaatatacaggttgtcgagcatccaaacgaccgtcgcgagcgctttatccatgttgagttttcgcgaacgcaggtcagtgtcaaccctttcgcgaagatccggcaaacggttggcaaacgccgcaagtcgctcaaatttcgcctttccacgctccgcgtgccaatctggatggtagcgatactggcgacgtcctcgtgcgtcggtgccaaccgcctgcaggtgagagaatgggttagtcgagatgacgacattggtgtaggccgggggtatcgccagcgcgttaaggcgagccacttccgaaccctcggtgatcctacgaccatcgggtccgtagtatcgaaatcctctttcgccctgtcggcgggttatcccggtttcaagtcccgcaatatagactagaccggaggacagtttcgcctcggctaccgtggtaacgattttggttattacggtgtccattccgctaaaactcaaatctgatagctaggttccctacgacctccgtcaggacgagatcattgcggacatgcagttttcgttggcatctcgcacgggatccgccgttatctctgttgggacactgtgtgccatggcaggggagggtcatatttaatgacgccgcggatcaaacccatattgttcgctagaacataatctcagtggccgaagtcggccttaccgaactctcccgcgccgggcgttgcgcccaagaccaaggacctcgtcaccgaggcggctagccgcacatgttccagattcaagcgagtaagcttgctctcaagcgttcgcgagatgcgtcgaccaagagctttcctcagcagatgatcaccgatcctgcgaaaaccacggaagaatgttggcccgcgcgtcatgcgcgatcggtgaatcccgaggcaagattaggccggaaccaaagcgttcgttgcacattctatggccgtaaacagccggattgaattcggtgtcgtgcatcgccttcaatcatacaggacacctccacttcccacgcccacgagatacgatcatggatgagaacagaaacgattggaccgcaactcgagcttattccctctgggagcaggcaggacgtcccttcggccaggacgaaagacattgggcgcaagccgtacttgagagagacctccttgaacgtacccgcgcttcgagcgatggcgctgaggtaatttctcgcgcgcggcaaaacgagcgttctggtcatggtgcgaaacatagtattctaattgtggaggatgagccgcagctccgctatagcttcgtcgatttttttgacgaagctggacataagacgtttgaagcaggcaatgccgacgaagcattggtgcacctcaggaacaacgagatcaacaccctcttcacggacgtcgacatgcctgggagcctggacggccttggtttggcggcaacggttcgatctaactggccaagcatcaagataatcgtgacgtcgggtcttatcacactcgcgcattatgatgaggagctcggcgtctcgtttctcgcgaaacccacctcggctttcgaattgctcgagttgatcgccacgaacacccaaaaggcataggtcagtgcattcgggtctggggggatgctccgatggagcgctcctccggatgacaaggttggttttgtcgatccccccaagcttcccatgaatccgtccggtagcagacaggaacaaacgtctcgcggccaagttagctttcgtctcccatcgaaggcgcggctaaaccagcaacttgcatgcagggagagaacaaaccaacggaggatatcatggcaacgaccaagacactcgatgacctttttctcgatacactcaaggacatctatttcgcggagaagcaaatcctgaaggctctgccaaaaatggcccgtgccgcgcaatccgaggaaggcaagaccggatttcttcagcaccgcgacgagacgcaaggacaaatcgatcggctcgagcaaattttcgacctcctggggaaatctgcccgtggaaagacctgcgaagcgattcagggcatactggccgagggcgaggagatcattgaggagttcaagggctcaccggcgctcgatgccggcctgatttcatcggcgcaggccgtcgaacattatgaaattgcccgttatggcaccttgatcgcatgggcaaaacagctcggtctaaaagaagctgtcccgctgttggaagccacactggccgaggaagaggcaacggatcggaagttgacgcagcttgctgaatcacgggccaacgcgcctgccaagggcaaggctgcttgacaccataaagcggaagtacgagggggccgccggcaaggcggcctcttcgcagttgtctgatttttaccaagggacatcaacatggccaaacgcccagcgaaatccgcatccatctcccctgatgggacgatccatatcaacgaccagcagcttcaccgaggcgatggaggtgaactccatcagttcgccgagcaaggacaggatatcctcaccacatcgcagggcgggccggtcgccgacgatcaaaattcgctccgcataggtccacgcgggccacttctagtggacgatttccatttccgtgagaagattttccacttcgatcatgagcgtattcccgagcgtgtcgttcatgctcgtggctacggtgcgcacggcttctttgagacgtatgaatctctgtcggacatcacgcgcgcggatgtatttcaacgcgcgggcgagaaaacgcccgtatttgttcggttttcaacggtggccggcaacaagggctcctcggatctcgcgcgcgacgtccgcggcttcgcggtcaagatgtatacgaaggaaggcaactgggatctcgtcggtaacaacattcccgtctttttcattcaagatgccattaagtttcccgaccttgtccatgccgccaagcaagaaccggaccgagcgttccctcaagcccagaccgctcacgataatttctgggatttcattagcttaaccccagagagcatgcacatggtcatgtggattatgtcagataggacgatcccccgatcgctccgtttcatggaaggttttggggttcacaccttccgtttcgtgaacgccgaggataaatccacattcgtcaagttccactggaaaccgaaactgggcctgcaatcggtcgcttggaacgaggccgttaagatcaacggcgcggatcctgactttcatcgccgcgatctttggaactcaatccaatctggcaacttcccggaatgggagctcgcggttcagctgtttgatcaggacttcgccgaccggttcgacttcgacgtgctggatccgacaaaaatcattccggaggaagtgttgccagtgcgtccgatcggccggctggtgctcgatcgcatgccagacaactttttcgccgagaccgagcaggttgctttcatgacccagaatgtcccccctgggatcgatttcagcaacgatccgctactgcaaggccggaacttttcctacctcgacacccagctcaaacgcctcggaggaccgaacttcactcatcttccgatcaatgcgcctaagtgtcccatgcataatttccagcaggacgggcatatggccatgcgcaaccccgtcggccgcgccaactaccaaccgaactcgcatggcgagggaccgcgagaatcgcccactcgcggttatcggcatctagccgccgaggaacagggacagaaggtgcgggcgcgtccagaaagctttgctgatcactacagccaagcaaggcaattctttattagccagaccggcgcggaacagcgtcacatcgcctcggcgttgacatttgagttgagcaaggtcgaaattccagcgatccgagagagaatggtttcgcaccttctgaacatcgatgagacgctggcgaccacggtcgcgcaaaagctgggcctccagtcgatgccggagcccgctgacgcggcgatgccgacccgccaagatctggacgcctctccggcccttagtatcgtcgaacgaggcccaaaacgcttcgaggggcgcaagcttggcattctcgttaccgacggcgtcgatcgaaagctccttatcgcgctgaccaaggcgattgccgccgaaaaagctaatgtcgagctgatcgcgcccaaggtgagcggggtgaccgcggacgatgggagcttcatcgcggccaatcatatgatcgacggagggccttcggtcctgttcgacgcggttgtccttttgacgtcccatcaagccatcgacgatctcgtcaaggaagccaccgcccgcgacttcgtcgcggacgccttccagcactgcaagtatataggctttcaccagtccgccatgccgcttctagggaaagcgggagttgcagatcagctcgacgaagggacgattgaactgacagccagcaaggccattgccgcgtttgtcgaggaactcggcaagctacgtgtatggggtcgcgaaccctcgctcaaacttgggcaggcttcaccgccactcgcatgaggcaaagcgggcgcgggaaaaacccgcgccctctcatgggccaacaggaacccattatcattttgaactcctgcatccgccaaaatgcatcgtcatccagcttgcgtaacaaacttgtctgtttggcaaccccagacgccgaccgtgccggtaggcatgaaggtttatcggtgagttcgagaacgaccgctcagattgcaacaaatccaccggcgacccgctatctctcggtgatacattgacgcccttcaatctcaattcattaagcaacacacgcgccgctaactcttgggaacgatcactcaagttcgacgttactcggtcgcaacacttaatttaatgggagatttcatcatgggtcgcggcattctactttggcttctcggcgtaccattgccgatcatcatccttcttgcgttattcatgcgataggaggcaacgatgtctctatcggatgtgcaagaagccgttcctgtcgaatcctcaaagtcagctgtgtcctggggccctatcctcggtggtgccttcgcggccgtcggcaccacgctaattctcttactacttgggtcaggcgttggcctgaccatggtttcgccttggtcgggagaaagtagctccgcggcagcggttggtgtaaccgccgcaatctggctcgttgtcgtccagtggctttcctcggctctcggcggctatcttacaggacgactgcgcaccaagtggacggctgcccataccgacgaagttttcttccgcgatacggcccacggttttatcagttgggccgtggcgaccgtgttcgtggtcggctttttgacatcatccctaacgtctcttgccggcgcgggggcaagtgccgccggtgcggcggcgaccgcggccggtgccgcgggaacggccgccgcgtcatcttcagcatccgcgacggatctctccacttcctatttcaccgatgccctcttgcgcccggagcgcgtcagcgcgaatgcgtcgagcgacgatggagccgcttcggcggaggtctcacgtatcctcttgaacgacgcggcaaagggcgaggtgcctgagggtgacaaagcgtacatcgcgagcatcgtcacggcacgtaccgggttgaccgaggcggacgcccgggcacgcgttgacacgatattgaagcaaattgacgacgccaaggttgcaacgcaagccgccgcggacaaaacgcgaaaggctgccgcaaccacggcattggtagggtcgatctccctcctcattggcgcctttatttcgagtgccgccgccgcctttggagggaggcagcgcgatgaggaagaagacatcttactaacgggtcgaggaccgctcgtgtaatggagattcaagacgccccacggtggctcgacatgtggggcgttttgtcgatggcacgtttgatgaaccccaccatgcatcccagcaatgcttgttccggatgcgaaccggcaaacgccagacggccgggctttaagtggatttctctgcggaaacaaacaatggcgacctcggcccaggaggtagctacaaaatcgacaagacggtgagcgaagtttcggcatcggatttcgatggcctgatcatccctgggggcacggtaggtgccgaaactaaggggaaacgcgcaaatggtgccctttgtacgagatgtaatcaacgggtccaagccagtgggggtcatcttgccacggtccttggcttttggccgaagccaatgtcctcaatgggcggacggtgacgtcgtatgcgtccattcgcaccgatatcgaaaacgcgggtggcacatggattgaccaggaggtagtgaccgaccagggcctggtgacaagccgcaagccgcatgacctaccagcattttgcgcgaagattatcgagcaattcgatgaaggaaagcatcccgggcaggtttatcgagcttagttgacgaaccgtatccactcacctcgccggtttgtctctctctgatcaaggacgagctttgaggtcgaagtccggttccgcgatcggctagcctcgcaacgccaagaatccgtctgtcacgggttcagcggaagcgcacactccctaggaacttccacgatcattggccgttaacctgtcaatttggagataaatgaatggcaaacaccaacaacctcgacaacgtctgggatctcgccgagaagatcggcttctgcatgttgacgacccgaatatcacacgaacttcgcgcacgcccgatggccgcgcatcccgagcgtttggaaaacgcgttttattttctcactgacgtggacggacacaaggatgaagagattgcgcgtaacccgcatgtctgtctagcgttcgccgatagcaaggggcaaaagtacgtgtcgatatcaggatcggcggaggtgagcaatgaccgcgaacgcattaaggaactatggtccacgcccgccaaggcatggtgggatagccccgaggacccatccattcgcgttcttaaggtcacaccttcattcgctgaatattggagcagccccggtacgatcgtgagttatatgaagatggcggccgccgccttgggcagcgctaagcctgacatgggtaacaatgaaaaagtcgatatgtaatgagggagcgcgttaagactcctcaccggcgtcccagagcatcgcttttcgagacgaaacacgtgaagcgccgcaacggcagaatcaaccgagcgctgacctatggcgcgcgaaaggtgtgaccccgaacctcacgcgccgctcacctttaggcgagatggagaaattcaacatctttttagcggctaagccccacagcgaaaagaccgcgcttgagggtgggatggcacgggagcttacggtagcgtggatcggggacgtgacgcaggcggaccccgccaccatcgaacaccggcgttccccgattcgaccatcgcgcggtggacgcggtttggaagcttgcattacgaaagcgcggggtcgactttcatttggacgcgaagtttgtacgctaacgaacaaagtcggaaccataagtcccaaccaacgttttcgcggtttcaagctatcgaggtcgaaatgatcgccaatatgcaccccagcgaccttggcctattatacgaggtgttgcgggacgctgctgaactggtgacggagccatgtgaaaccacgccaaaggcgaacgtcgcggctaatttgctgatacagctgatccagcgcagggtatgccacctcgagcgaacatatcgtccttatggcaaagtgaacgagattgccctgatggaaatcgccctcccgcgagggtcggttttaaagataagtccgcccactgccttcgaattgccgggaacatagtcagtaaccgtctcagccgcttccaccagtttaggctcttcaaatacctctccccttaccgttacctgcgaggcggtctggctcgaacgattttggatttcgaataggacttgaaacccattacttcgtgcctccacttgaagaacggacacgccgaggtctggggaagtgtcgcgatccatcaatgcgtccctaccaatccagatcagaaccgccaggatgaccaaggcggatagggttccggttgtccactcaatccaatgaggctcgttagtctcaatatttgcgtgaccggtgtttttcgtcatttaggcctctagagtatcaggcgggcggccgccgcgccaatcgcaccaggaaaactcaagataacgatcatcatcaacgcttgcgtggcccctacgtcgtcggtgcgatgaaacgtccagaggcaaaacgcgctaatcattccagcgatgacgtagcctggaatcgtgaagcgcacgagggcatgccagctcggtgttccctcggcaaggtcatgacttcctcggaatgaaagtgtgtaaacaaatccgtgcatgagcgcgacggaagctactatcaagagaagggcatgccatggcgtcatcttgtaagacagaaggatcatctcctcagtcggcgcgacattcaggctcaggaaaagtgctccaatagccatgagaaacagttcgccagcatagctagtctcccggtcgcgcagcggatcgccactatcgggatcgccctgttgagattgccctcccaactgactgcgtccgagcatcgcgccaatgctggctgggaccgattgcacagcgatcatgccgatgatttcgtgaggcgcctgatcggaggttacaacaccgatcgccacgagaatgaggccgctcgcgaatatgccaagacaataggcaatgcttgcatccctcatcgcttcaagccacgttgtggtctgttcgaaaccgacgcggtccgataagacgataagcaaaggaatattgaggaccatgaggatcaataaccttgttcggtccatgtagaacccaagctcccacatctccatggtcattagcatgggtaaagcgaacagaagcgcgccggcgattcctcttgcaatgccggcaagaaacttgcccaggtcgaaatccttcgcagttgaacgtggagccagagcgttattcatgatattaagttccaccgtccaaacgccgacgcggcccctttaaggaagagggcggccacggttgacagtcgcgttggcctcgggagcgcgagagcagcggaaagcagcgcggtcattgacatcaacgttgccatcttcattgtccctgtcacgcgtggaagatgatgctcaaacactagcgacgaagctcgtgccaccccactcgcagatcggcgacggatggcgactttacccgccgataacgggcttcgacaagattatagataccgaaggccgc

SEQ ID NO: 43 - DNA, 30336 bp, Rhizobium matallidurans
  source 1..30336: mol_type = genomic DNA
gccccggcgaaccggggcttcgtattgagcgatgctgcgaaccttacggcttggcggcgggcttggcgccggcggcgggagccgcttcggcggccggagccggcttgataaccttggcaagctcggtgctggtcgtcttctgcaggtcgcgcgagatgccctgcgcccagatgtcggcggccttgacggtttcgcgcgaggcgatcgggccgtccttcagcagcttctggccgaccggcgagctgtagaaggcggcgatcgcattgagttcctcgatcgagaacgccttggcgtaggtcagagccgcttccttttcgaggtcggcgcgacgcggcgccagagccagcgcctgcttgtcgacttcggcggtgatctggtcctgatagttcggcgaatcctggatcaggtcggccttcaggcgctccgcgagacccggcaggatgttgtcgaactgggtggtggcgccgatcgcgtcgatggccgcgcgggctgccttcagctgttccggcgacgcttcctgcgcatgggcgaccgagcccaggacgacacccgagagaatgacggtcgcagcagcaaaacggccaaaacctgcaaatttattcatgagttccttgctcctgttaccttgttgcccgcagttcgcgcgcgcccgccgggccggcgatgatcgccagcgcggccatattgagaaagaggccgtgttccacgacaccagggatcgcattcaactgagttgagagcgcctctgcatcaggaatacggccaaaagatgcatcgataatatagtgcccgccatccgtggtgaaattgccgtcgccggattggcgcagcgtcaacccacccgaaaggccaagtctcgtggccgtcttttcgatcgcgatgcgcgtcgaaacgaggccgaacatgttgacttcgatcggcagcgcgaaggcgcccagcgtatcgaccagcttgctctcgtcggcgatcacgatcatgcggccggacgcggcggcaacgatcttttcgcgcagcaaggcgccgccgccacccttgatcaatgcgagcgccgcgtcgacttcgtcggcgccgtcgatcgtcagatccagttccggcagttcgtcgagcgacttcaagggaacgccgagctcgacgcaaagccgcgccgtgcgctccgatgtcggaacgccctcgaccttgaacccgtccgcgaccttctcggcgagcaaccgcacgaattcctcggccgtgcttccggttccgatcccgagacgcatcccatgctcgacatgggcgagtgccgccgcggcggccttgatcttcatttcgcgggcatccatgcgccgctcactcccagtttgctttgcccggtgttgggcgacccagcgttaggctggttgcgttgtttacacggcccgccagtcaaacgaaagccaaaataacatcgcggtttggaaatccaaaccacatgccgaaagcccgcttcgccgggccaaagcgttgcttttgcggccttcatcgcttaactcggatgcatcccaacactgaacaggcgaaaactccattgacccctgcccttgtcgtcttcgatctcgacggaacactcctcgacacccatatcgacctcgtcgatagcctcaatcacacgatcgccgcgctcgacctcgcgccggtcacctatgacgacctgacgcatctggtcggccatggcgccaaggtgatgatcgagagggcctgcaagctgcaggggcattcgctggaacccgagcaactgcccggcctgctcgaacgcttcatcgctcattatacagaaaacatgccgggcgcgaccgtgccctatcccgggctgatcgatgcgatggatcatttgaagagcaaggggtacaggctcgccgtctgcaccaacaagctggagggcctcgcccgcacgctgctggagcggctgcagctgacgcattatttcgacgcgatcaccggcggcgacaccttcgcggtccgcaagcccgatgccggccatctcctcggcacggtcgaaatggcaggcggcgacccgcgacgcacgatcatggtgggcgacagcgccaacgatatcctcgtcgcgcgcaatgccggcatcccctcgatcgccgtgcccttcggctattccgacgtgccgatcgaaagcctgcggccgacccacatcatcgccgcgttcagcgagctcacgcccgacctcgtggaagacctgatcggcgcggccgaagtccgcaacgccggctaacatttcgcggccaaaacgggttgttttgagcgaaaacatcatctcacgattgccgcgatgacgccgcgtcactccctggtttagcgaatcgcgaacctgatcaattagcgatcaaacgaagtcgcgaccccgtgatttcatgtgaaaaaacgtgctcgcgactgtcagatccgcttcacaatccggcctcaattgaggcgcgaactggctcttgccgagggtaatgttcgccactttgtgtgcaatgatggattgaggagatctgatatgcgcattcaattcgcagccgctgccgcggtgcttgccctcggactttccggtgcggcccttgcccagccgatgtattccaacgactacaacaatgacagcgacggctttgctcccgtcagggttgccccgccgaagccggttcactacacccagcacaaggcgccgcagtattccagcgactacaccaacgacagcgacggcttcgcccccgttcgcacctcgccgccggtcgacaagatggcgacggcaagcatcaagccactccccgcatgcgactacacgccgagaggccatggcctgcacacggcaggcggtgacggcggcgcctcgcacaccgatgcctgccgcgacgtcggcgacaagtagaccggcgaaaagcgaaagggccggcttgcaaccggcccttctcgacagcggcggcgcctgacggcccgctcagccgttgaccgtctcgccgaagaccgattcgaacgattcgcgcagcagcacgtccacgtcgtccatcgtcaccggcaggccgaggtcgacgaggctggtgaccccataggccgaaatcccgcagggaacgattcccccgaaatgatcgagatcgggttcgacattgagcgacagcccgtgaaacgtcacccatttgcgcaggcggatgccgagagcggcgatcttgtcctccgccatgcttccatccggcaggggcagcctgtcgggacgacagacccacacgccgacacgatcctcgcgacgctcgccgcgcacgttcatcccgcccagcgtacggatgatcacctcctccagtgccgccacgaaggcgcggacatcctggcggcggcgtttcaggtcgagcatcacataggcgacccgctggccgggcccatgataggtgtactctccgccacgaccagtcgcatgaaccgggaagcggtcgggctgcaccagatcgcgtgcatcggcgctggttccggccgtatagagcggcgggtgctccaccagccacaccagctcgtcgccgccctcggcgatatcggccacttccttctccatgatatccacagcctcctgatagggcaccagcccatcggatatccgccagcgcgccgggcgcgaaccggcgtgtggaaacatggaaaaatcgagatccgtgcgtaacatagccattccttgcgacccgcactgcctgtgagagcgggcttttcagagcgtctatatggctccgatttgccgcctttacaaacgctgtcaccttgtttgaaaaaatctgtcacatggcccttgtgtcccgaaaaaccttttgctacatgctgcgtcgccggcacaaaccggcacctaccacgatgcggtcgtggcggaattggtagacgcgcagcgttgaggtcgctgtggggcaacccgtggaagttcgagtcttctcgaccgcaccatctctctcccgaggagtgagaccagccagtacgactggctcccggcgacgcgaaatgtcgcgcacggcatctcttaatgagagattttattgtctataacggctgtctcccagcccaatgaaatttctcgacgatgtccgataagaccgactggcacaatcccctgcaaggcatggcgctgatgatcggtgccatgatcgtccttcccgccatggacgccatcgccaagtacatggcgacattcgagggcatgtcgcccggccaggtcacgttctaccgattctttttccagctcgtctgcacgctgccgattcttttcgtcatgttcggctggaacgcgctgcgggccaagcgaccgtggatgaacctgctgcgcggcgcgctgcatggggcggcgagcctcctttttttcatcgccgtcaaatacatgccgctcgccgacgtcttcgcgatctatttcgtcgagcccttcatgctcgccgccctgtcggccttctttctcggcgacaaggttggctggcggcgctggacggcgatcgtggtcggcttcggcggcgcgatgatcgtcatccagccgagctatgaagtcttcggcctcaaggcgctgctccccgttctgtgcgccttcctgttctcgctctatcttttcctcaaccgcgccatcggcaacgccgattcgccgctcacgatgcagaccatggccggcatcggcggcacgctcttcatgtccgtcgcgctgatcgtcggaaacggcctgggcgtcagcgatttcgaagtctcgctcccggcatcccttctcggcctcgtgctgctgctgattctcggctcgctctcgggctacgtgcacatgatcgtcgtcagggccttccgaatggcgccgctctcgcttttggcgccgttccagtatttcgagatcatctccgccactgtcctcggctacgccctgttcggcgatttcccgaacttctccaaatgggtgggaatcatgatcatcgtcgcctccggcctcttcatcatctggcgcgaacgggtgcaggcgcgagccgccaaacaggcctgaaccgtaaacgccttgttaactccgcctattgagagaacatcaattcgctggcgctagaagaatcttcggtctcatgatgaggcctggagagaaaagatgagcgaaattcgactcgcttttccggcatgtgtcatcgccggaaagcatcgacttggcgtggaggacatcgatcttctgcgcagacacagttttcccgagggcgtcaggagcgccgacgacgttgtcgtcatgctggccctgaacaattcctgccccgaaaaatgccccgaatggaacacctatttcgtggagcaactcgcggccttcatcgtccattataactacccacaaggctctctcgacgaaatcaacgtcgcatggctgatgcgcatgatcgccgccgacggcgtcgtccattcggccgtcgagctggaactcgtgctgcacgtcatcgagatctccgcctacgtccccgacgagctgcgcgccttcgcgctagaccagctgcgcctggcgctgtccgacagccgcggcgcctatcatcacggccgcgccatcgcgcgccgcggaatcacgagacaggatgtggattacatcatgcgcgtgctgcgggcgctcagcgacggcggtgccataacggtacaggcgctcacctgggcggtgctgatgcgcataggcgaggaaacgcttcccgcctccaaccatccgcgctggtcgcagatcgtctcggcgctcgtgctggtcgattacgccgaggcgccacggcgcacccgctggctccggctcgtcgatagcggcgaagccgccgtcgcctgatcgaacacagctcgatccgtgccctcttctccgtgattgtgcgttcccgtctttatgcttaagactcgaagcgcacgtcacgggtggagtcttcatgttcacgaaaattctgatcgccaatcgcggcgagatcgcttgccgcgtcatcaagacggcgcgccgcatggggatagcgaccgtcgctgtctactccgacgccgatcgtgacgcgctccatgtcgagatggccgacgaagccgtccacatcggcccggccgccgccgccgagagctatctcgtggccgagaaagtcatcgaggcatgcaaggcgaccggcgcccaggccgtccaccccggctacggcttcctctccgagcgcgcctccttctgcgaagctctggagaaggaaggcatcgtcttcatcggcccgaagcccaaggcgatcaacgccatgggcgacaagatcgaatcgaagaagttcgccagcgccgccaatgtctccaccgtccccggctatctcggcgtcatcgaaaacaccgagcacgcggagacgatcgccgccgagatcggctatcccgtgatgatcaaggcctcggccggcggcggcggcaagggcatgcgcatcgcctggaacgaggccgaggtccgcgacggcttcgaccgcgcccgctcggaggcgaagagctccttcggcgatgatcgcgtcttcgtcgagaaatacgtggtcgatccccgccatatcgagatccagcttctcgccgacgcgcacgggaacgtcgtctatctcggcgaacgcgaatgctccatccagcgccgaaaccagaaggtcgcggaagaggcgccctcgcccttcgtcgacgaggccacgcgcgcggccatgggcgcgcagtcggtggcgcttgccagggccgtggactaccagagcgccggcaccgtcgagttcatcgtcgatcgcgatcgcaatttctacttcctcgaaatgaacacccgcctgcaggtcgaacacgctgttaccgaactcgtcaccggcatcgatctcgtcgagcagatgatccgcatagctgccggcgagaaactcccattcgcgcagcaggacatcgaactcaacggctgggccgtcgaaagccgcatctacgccgaggatccctaccgcaatttcctgccctcgatcggccgcctgacccgctaccggccgccatccgaaggcaaggccggcaacgcggtcgtgcgcaacgacaccggcgtcttcgaaggcgccgagatctcgatgtattacgatccgatgatcgccaagctctgcacctgggcgccgacgcgcgccgaggcggtcgaggccatgggcgaagcgctggatggcttcgtggtcgacggcatcgagcacaacgtcccgttcctgtcggccctgatgaaacacccccgctggcgcgaggcccggctgtcgaccggcttcatcgccgaggaatatcctgatggcttcgcgcccatgatgcccgatgagcgccagcgcgcgacgcttgccgccatcgcgttgtccgccgcgctgatcgaagccaatcgccgcgaaaccttcgccgaccggctgcgcggcgcgtccgatccgctgcgcgatcactggagcgtccggctcggcgacgattatatcgacgtccgcctgctcgatggtctcgtgaccgtccccttcgaaatggacatggatgtcgccggcgagaccttgagcgtcgtcaccgactggagaccgggcgagccggtctggcgcggcaaggtcggcaggcagccggtcacggcgcagctgcgcccgatcctcaacggcctcaggctggattggcagggcctgtcggtgaagtccagggtgctgacgccgcgtcacgccgaactcgaccgtctgatgccggtcaagctgccgccggatacgtccaagctgctgctctgcccgatgccgggtctggtcgtctcgatcgcggtcaccgagggacaggacgtcaaggccggagagacgctcgcggtcgtcgaagccatgaagatggaaaacgtgctgcgcgccgagcgcgaccttgtggtcggcgtcatcaacgccaggccgggcgaaagcctggccgtcgatgccgtcatcatggagtttgcctgacctgttccggcacaccgccccgtcgcgatccgctccgcatttgttaacgcgtgaccgctaatatttaacccatccggaggcctgccggatggagtaagcgatgagtgtcatgcaatccgcgctgctgctgctgtccatcaatctcggcatgctgtggctcctgatgcgaatgcccctggggatgaggacgctgcatgtcagccgcgccttcgactgcacgccggaagcgctctggaacgccatgaacccgatgggcgcgcacgccagctggcaccattcggtgatatcgagccggcaggtggaggctggcggcaacatcgtcgaacagatctatcgccataccgacagaaacgacgctccccttcgccggctgctttcgatcgagcccctggcggcgatcaccgccaacgcccacggttttcaatcatccgtcatcgacgacagcacgctcgatgcgtccttctggagggattatcgcgagcgccggatcatcaggccggtggcgggcggcgcggttctggaaatcgaccagacggatcgctatcgcggcctcgccttcctgatcttccgctacgtcgccctccgccgcgaaatgcaggcgctggacggctggctgaagaccggcacgtcagagccgcagggttatttcgagcacccgctggtgcaggtggcgcttgccatcctgtcgacgctgctcctctggcccttcatcggcctgacgacgcgcggcctgatgatctcgaccttcctgacagtcgtgatcgccctgcacgaactcggccacatggccgcctaccgcatgttcggccacacgtctgcgcgcatgatcttcattcccttcctcggcggcatcgccatcggcagccggccctatcgctccctgttcgaggtcgcgacctgcgcgctgatgggatcgggcatgtctgcattcctggtgccgatcctcatccttggccacggcttcacgcaaaacggcatactgccggccgcggctgacccgccgatcctggtgttcctgctgatcctcggcgccttcaatctgctcaaccttctgccgatgcagcgcttcgatggcggccaggtgttgcggcagatcttcagaacccaccgttcgcagatcctcgcgagttttctcgtcacgctctgcatcctgtcgatcggcgcggcgatagggcttccggcgcgctatctcgtcgtcggcctgctgattttcaccctcgtcagcgtcatcggcggcggctccttcaagccgcgccagaagctcgacgagatgaacggcggcgaacgcttgctcgtctccttcggcctctacgccgccatcgccatgcacggctatgccgtgatcaccgcgatcgaccggctgttttgacgcagatggtataaagaccggcgcaagccgctcatccgacaaggattttaccaggcggcgaggctttttccttgagccccgctccccaggcgtgcaaaagtccgcccgatcaaatcagcatattggagacgaccatggacgttcgcgccgctgttgccgtacaggcaggaaaaccactcgaagtgatgaccgtgcagctcgaaggccccaaggccggcgaagtgctgatcgaggtgaaggccacgggcatctgccacaccgacgacttcacgctctcgggcgccgacccggaaggcctgttcccggcgatcctcggccatgaaggcgccggcatcgtcgtcgacgtcggccccggcgtcacctcgctgaagaagggcgaccacgtcattccgctctacacgccggaatgccgcgaatgctactcctgcacctcgcgcaagaccaacctctgcacctcgatccgctcgacgcaggggcaaggcgtcatgcctgacggcacgagccgcttctcgatcggcaaggacaagatccaccattacatgggctgctcgaccttcgcgaacttcaccgttctgcccgagatcgccctcgccaagatcaaccccgacgcccccttcgacaaggtctgctacatcggctgcggcgtgacgacgggcatcggcgccgtcatcaacaccgccaaggtcgagatcggctccaccgccatcgtcttcggcctcggcggtatcggcctcaacgtccttcagggcctgcgcctcgccggcgccgacatgatcatcggcgtcgacatcaaccctgaccgcaaggcctggggcgagaagttcggcatgacccacttcgtcaacccgaaggaagtcggcgacgacatcgtgccctatctggtcaacatgacgaagcgccacggcgacctgatcggcggcgccgactacaccttcgactgcaccggcaacaccaaggtcatgcgccaggcgctcgaatcctcgcatcgcggctggggcaagtcggtcatcatcggcgtcgccggcgccggccaggaaatctcgacccgtccgttccagctggtcaccggccgcaactggatgggcaccgcctttggcggcgcgcgtggccgcaccgacgtgccgaagatcgtcgactggtacatggaaggcaagatccagatcgatccgatgatcacccacaccatgccgctcgaagacatcaacaagggcttcgacctcatgcacaagggtgaatcgatccgcggcgtggtggtctattgatcacccagccaaactacacggtcgatgcgcggaggctcgatgagctctccgccgtcgagctgtacgctctgctgaaaatgcgcgtcgacgtcttcgtcgtcgagcagaactgcccctatcccgaactcgacggcaaggacgcggacgccctgcatctgcgcctgctgcaggatggcgatctgatcgccgccgcccgcatcttcgcaccggcggacaaggacgcacccgccaagatcggccgcgtcgtcgtctcgcctgatcatcgcggcaaacgcctcggcgacgccgtcatgcgcgaggccatttccgtctgtgaaaatcgctatccgcaagcgccgatctacctctccgcccaaagccacctcgcccgcttctacggcggcttcggcttcgagacgacgtcggaggaatatctcgaggacggcatcccgcacgtcgacatggtcagagcctgacgagccggaccagcggatcccaccatgcggattcgctggttttcatcaggccggtttgttagatttgtatccgacatccaaccctgcccaacagggcgcggggagcgccaagacacacccaccacgcaatgcggcacgactttgaaatggccggcggctttttcacaaatcggtcctgatttgggagccatcggcagctgaggaggagaagctgagcatggcatatcaggtatcaatccaccccgcgctcgatggcggggtcaagaaaggccagtcgaatttcggtggtggcacgcttgtctgcgcctgcgccagccgcccggtcaaactcgcggtcaagggcacggtcgcgcacaaccatgcctgcggctgcaccaagtgctggaagcccaagggcgccgccttctcggtggtcgcggtcgcctcgaccgacaacgtcaccgttctcgaaaacggcgacaagctcgccgtcgtcgacaaggacgcgctgatccagcgccacgcctgcaaggagtgcggcgtccacatgtacggccccgtcgagcgcgaccacgccttcaagggactgtccttcgtccatccggaacgcttccaggagcctggctggcccgaaccgaccttcgccgccttcgtctcctcgatcatcgagagcggcaccccgccctcggccatggccggcgttcgcggtcggttgaacgaactcggccttgcgccctacgactgcctgaacccgacgctcatggatgtgctcgcgaccttcgccgcgaagaaggccggcacgctgaaggaggcgtgaggatcgtacttactgtgaaacctgctgcgcgccgaccgcgcgcagcgcctgcgtacgcgaatccatgtatttttaggaagcgccgactgtgtcgatttgataaactgcttccaacgacaaaccaagggatcacgtatgtccgcaacatccgccttgtctctgacagaacagcagcagaatctcatcgatcgtttagtcgagaccggccgttttgacggcgcgaacgacgttgtgtcgacagggcttcgcttggtcgaagaacgtgaacggcaggcggcagcatttattgccggaatcgaggccgagatcgaaaaagggctagccagtggcccttcggagccgatggagccgatgaaagatctcctcgtcaagttccgcaccggaaagatatgagcagcggcacgatacgtcgtcgacggctgttccttctggatgctcttgatgcctggaacttcattgccaaggatagtgaatctcgcgcggacgatttcgcattgagacttgaagctcgagccgcagatatttgccgacaatccgtttcttggcgtaacccgttttccgaagttcccaaacctccggctttttactttcagacaatatatcgtggtctatgaacccatttccgacggatcgggcatagaactgctccgcctcttacatgccgcgcgagactatcatcgcttttttgaagactgacaccacggacaccgacaaacacccatgcaccatatctacgttgacgcagacgcctgcccggtcaagccagaggttctcaaggtcgccgaacgcctcggcatcgaggtgaccttcgtcgccaactccggcctgcgcccctcgcgcgatccgatggtgcacaatgtcatagtctccagcgccttcgacgccgccgacaactggatcgccgagcatgcgggcccgggcgacgtcgtggtcaccgccgacgtaccgcttgcggtgcgctgcgtcgcgacgggcgccttcgtcaccggccccaccggccgcgtcttcgacgacaccaatatcggtatggcgagcgccatgcgcgatctcggcgcgcatctgcgcgagaccggcgaaagcaagggctacaacgccgccttcggcccgaaggaccgctcccgattcctcgaaacattcgatcggctgtgccgccgcgccaaggccgtcacgccaccaccaggagagtagaatgaacatcctatcccaggcgaccgccttcggcggcatgcagggcgtcttcacgcacacgtcggatgcgctgaagtgcgacatgaccttcgccgtcttcgtgcccccgcaggcgatcgaaaagccctgcccggtgctgtggtatctctccggcctcacctgcacccacgccaacgtcatggaaaagggcgagtatcgccgcatggcggccgagctcggcctgatcatcgtctgccctgatgtcagcccgcgcggcaacgacgtgccggacgaactgaccaactggcagatgggcaagggcgccggtttctacctggacgccaccgaaaagccctgggccgagaattaccagatgtacacctacatcaccgaggaactgcccgcctttatccgcccgcacttccgcatggacatggatcgccagggcatcttcggccattccatgggcggccacggcgccatgaccatcgcgctcaggaaccccggccgcttcaagagctgctcggccttcgccccgatcgtcgagccctcgaccgccaactggtccgcccccgccttcgaaaaatatctcggggccgaccgcgccgcatggcgccagtacgatgcctgcgccctggtcagggatggcgcccgcttccccgaattcctgatcgaccagggcaaggccgacggcttcctggaaaacggcctgcgcccctggctgttcgaagaggcgatcgagggcaccgacatcaagctgacgctgcgcatgcacgagcgctacgatcactcctactacttcatctcgaccttcatggacgatcacctgaagtggcatgccgaacgtctcggctgagacgtccccggacacacgatcggccccgaaaggggccgatcggtcgatgcgctcgtcgtttgcgcctccatatgtcgcctgatcgaaccgcgccgcgtgacagatccgccgccgtccgatcaaacctcgcgcttgttacctgcgcttgtcgatcgcaaaggcgccggcgcccgcgaacaccaggaacaggaagatgaagcagtaaagaattgctgcttcgccgccgttctcggccgggtagaagccgctcggcgcatgcgccatgaagtaggcgaccgccatctggcccgacaggataaaggcaacagggcgggtaaggaatccgacgaggatcgccagaccgccgaagacctcgagcagcgcagctgccagaagcatgggcggaagggaatcgccgagacccggctgggggatcgggaaggcgaaaagcttcatcgtgccgtgctcgatgaagagcaaggcggtgatgatgcggagcgcggccagcgcatagggctggtacgcgttaaggcgttcgaaactgggcataagtctctccttaggtcataagacagaggagcgttagcgatacgctcgaagacaaaaaagccaccctcacagcaactccaatcacatccacttgattttcatcgtttttccacgacttaatcaccctagagcggaatattgtcgtgcttcttccagggattggtaagatccttgttgcgcagcatcttcaacccgcgcgccaagcgccgccgcgtcgaatgcggcatgatcacctcgtcgacatagccacgctccgccgccacgaacggagacaggaagcgctcctcgtacattctggtatgttcggcgatcttttcgggatcggcgatgtccttgcggaagatgatctcgaccgcgcccttggcgcccatcacggcgatctgcgccgtaggccacgcatagttgagatcgccgcgcagatgcttcgacgccatcacgtcgtaggcgccgccgaaggccttgcgggtgatcacggtcagtttcggcacggtcgcttcggcataggcgaagagcagcttcgccccgtgcttgatcagcccgccatactcctgcgccgtccccggcaggaagcccggcacgtccacgaaggtgacgatcgggatgttgaagcagtcgcagaagcggacgaagcgcgccgccttgcgtgaggcatcgctgtcgagaacgccggccagcaccatcggctggttggcgacgaagccgaccgtcgagccctcgatccggccgaagccgcagacgatgttcctggcgaaactcgcctgaatctcgaagaaatcgccctcgtccgccgtcttcaggatcagttccttgatgtcgtagggcttgttggcattggctggcaccagcgtatccagcgacatgtcggtatctgtcaccgactggtaacattcgatctcgggaaccgcggacgtgttcgactgcggcagcagatcgatcagccggcgcacctgcgagagcgcctcgacatcgttgtcataggcgccgtcggcgatcgaggatttcgtcgtgtgcaccgaggcgccgcccaactcctcggcggtcaccgtctcgttggtcacggtcttgaccacatcgggacctgtcacgaacatgtaggaggtgtcgcgcaccatgaagatgaaatcggtcatggcgggcgaatagacgtcgccgccggcgcaaggccccatgatgacggagatctgcgggatcacgcccgaggcgagcacgttgcgctggaacacctcggcatagccgccgagcgccgccacgccttcctggatgcgcgcgccgccggcgtcgtagatgccgatgatcggcgcgcggttcttcagcgccatgtcctggaccttgatgatcttctcggcatgcgcctccgacagcgagccgccgaacaccgtgaaatccttggcgaagacgaagacggtgcggccgttgaccgtaccccatccggtgaccacgccgtcgccggcgatccggctcttctccatgccgaaatcgttcgaccggtgctcgacgaacatgccgaactcctcgaaggagccctcgtcgagaatgaggtcgatgcgctcgcgcgccgtcagcttgccgcgcttgtgctgcgcctcgatgcgtgtctccccgccacccttgcgggcgatatcgcggcggcgttcgagctcttcgagaatttccttcaaggcgacctcccgttacggcgcgattattccgaacccgggctgagcgtgaagatcgaccggatacgcgccgcgatgttttcagcaagaatttcgtcggacgcatccgaaaggttcgagcggctgagcacctcgaactgcgagacggcgatgacggtgccgtcgtcgaccgacgccgcatcgacggtgatcttcgccgagctctggctcttgtcgtacccctgctccttggcgacggaaacgacgcggatggtcagcacgacgcgcggatagacctccttgcgcaccgtggcgttgatcgccttgttgacccgatcgcccacgccggcaagcactgcgggcggcactttcggcccggagacgaccacggcgctgcgcacgtcataaaccggacccggcgcctccttcggcatcagcgagccgcaggaagccagcgccaggctcgaaacgagtgcgacaagcgaaaataagattttggaaacaaccgactgaaacatattcatgacgaaaaaccgcgtccaccccactaagagtcgcgatcttcgccataaagacggtcatggcaatctatttcagcccttcagtgccaaaaaagcacgggtggcggcgagaaaatcgatgaaacgcaacgcgcgccgctcttgcgcctcttcgtcgctgccccagtgctcgatcgtccagtcctcttcgagatgcgcgagcgaccagacttcgttttcatcgagctcgccttcggcaaacgccagcgccaaaagcgccgagcccgtcagcgtcgtgatcgtgtgcagcaccgcgagcgcgatcgcgttgtcgtgcttgcgcagcgccgccgaaaacgcagcgatggcgctttgcggctgctgctggtggacgatgccctcggccaggatgaagcgtgcgccgagcgcgttcgacgcccagtcgagcaccgggtcccagagcgcggtctgccgcgccaccagctcttccggaccctcggcgcggtaacacagcatgtcggtgccggaaaagcgcagtatgtcctcgaacaccgcctgcgtgtcggtcgcaacgccgtcgatggccgtgttgatcagcttggtgacgggcatggaggccggatcgatctcgtcgccctgcgccgtccactcgcccgccatcagctcggcgagcttgcgcgtcggcgcagccaggagattgcgggccggcgtgcgcaccggcttgccgtcgagcgcgaccacgaagccggcgtcggtgccctgggcctcgctgaccgagacgtccttgtagaagcgcttgggcagcggcttcttcatctggatctgcgcgcggcggatcggatcgggatggctcagcccctcggacaggtcgttcaacagatcacgcatggctcacctcaggaaaaatgcttcagtatgtcggccggatggtaggcgatcatatcggcgccggccgcgaccagctcgtcgacgctggcatagccccaggacacgccgatcgccgtggcaccggccgccttcgccatctgcatatcgtagatcgcatcgccgatgacaatggtgtcggcgggattcatccccgtttcgctgcagcattccgtcaccatggccggatgcggtttcgacgggcaatcgtcggcggtgcgcgagacgatgaaatcgcctgcaaaaccgtgcgtctcgagaatgtgcaccagtccccgacgcgactttcccgtcaccgcgccgatcaacacctcgtccttctcggccagcgtccggatcaactcgccgataccgtcgaacagcggcacgtcgacgccggcttcggcgcgcacatcggcgtagatcgccttgtagtgcgcggtcatcgccaccgcctcgtcgtccacatgcggcttgccctgcatgcgcgcgatggcgatatcgagcgtcagcccgatgatcgccttggtctgcgagatatcgggccggtcatggccgaaatgcacgaaggtgcgcgccatcacctcatggatcagcgcggcgctatcgacaagcgtgccgtcgcaatcgaacaatgccagtttcattcccgaattcatttcaagcgtcattcccaagtttattcgaagtcttcccggtccgcttccgccagatcgaggccgagcaggttccaggtctggaccatgtgcggcggcagcggcgcggtcacccgcaggcgcccgccgctcggatgcggaacgtcgatcttgcgggcgtgcagatgcagccgcttctggataccgccggggaaatcccagttgtggtcgtcgtcgaaatacttgggatcgccaatgatcgggtgcccgatatgcagcgcgtggacgcgcagctggtgcgtgcggccggtatagggctccatctccagccaggcgaggttctgggccgccgtctcgcgcaccttgtaataggagatcgcgtggtcggcgccctcctcgccgtgcttgcagacacgcatacggtcaccgtcgggcgtctgttccttcaccagccaggtcgagatcttgtcctcgtgcttgcgcggcacgcccttgaccagcgaccagtaggtcttcttggtgtcgcgctcgcgaaacgccgccgtcagcttctgcgccgcaccgcgcgtgcgggcgatgaccagcacgccagaggtgtcgcggtcgaggcggtgaaccagcctcggcttttcgcccttcgggctcgtccaggcctccagcatcttgtcgatgttgcgcgtcacgccggaaccgccctgcacggcaaggccggccggtttgttgagcacgatcaccttgtcgtcctcatgcaaaaccatgcgctgcaacagttcgtagtcgccgccatgcttgagatcgtggctggcgatcggcccgctcttcttggcgtcgacatcgagcggcggcacccgcaccacctgccccggctgcacgcgcgcatcggtcttcacgcggccgccatcgacacgcacctggccggaacgcatcagcttctgcagcggaccgaatccgaggccgggatagtggatcttgaaccaacgatcgaggcgcatgcccgcctcgtcggcttcgacggtaatatgttcaatgccagccatgtctgtactttcggaaagagttgccggcaccaggcgcggcctttgccgctggctttagagcattttacgcaaaaacggaaacctgaatctcagaagacgtcagatcagcccatgtctgacctcagatcaacgcgcgcatcatcgcaagcccggcgaaaaccgccgccatcgacagccccacgctcgccaccatatagaccgccgccgacgccatcgccccgcgctcgatcagcgaaatcgcatccagcgaaaaggcggagaatgtcgtgaagccgccgagaaacccggtgatcaacagcagccgcaattcgttcgaggcattgaaccgccgcgcgatcagctcggcgaaaaccccgatcacgaaacaaccgacaacattgacggcaagcgtcccccacggaaagcccggccccatcagccgcaacgaccactggccgacataatagcgaagcaccgaaccgatggcgccgccgacggcgacgagaagagcctggatcatgccgcttgtgtagcgcaggccggaagcgttgccaatcgacagtgatcgctacaattcaccccgacacctcaatagctgcacggccggtcgttgttgaatcccagcgcgcaggccgagttcattggcatgtcgccattgcggctcggcgcggtcgacgtgcaggccgtggcgatgaaggcggttgcaagcagcgctccgacaagcgcaagcgcgtgaaaacggtgcatctgaactcctcctttgaaggatttgacgatcatgttttcgagtaacgcggaaagtaacgaggccatgagaaagatctagcggcgcactacatttgaaatatatcgcaaaaagcagaagcacggcacaagaaccatcacattcgctcatattttagcgatattcttagcggcacgggaaggtgcgccgtcctaaatctgtcacatgtcagttctcgttggttccatttcggcaagtacggcggcagcggcgtttgaagcgctgcgcatcgccccgcgcgtatccgcgagcaccgccgccaaggacgcccgcaaggtggccgaacggcagcgccacgccgatgccgacgaaggccccgatgaaacggccgccgtcatcaactcgaccgaagtcgcgctcgacctgatgaccatgggccagcgtcagccgcaggccgccctgcagcaggctctcaagctctacgaggaagactgagaccaccggtcgcgatccctgcgggagccgatcggcagatgcacgcgacaaaaaattgctcgccggcgacattcccccttgccaagccgcaccatcgccagataattgcgctcaaccttgttgggagaagccggctcgtcgcagccggtgccgaaggagcaaccgccccggaaactctcaggcaaaaggaccagcaaggggcagacggaactctggagagacgcgtttaaaaaaacgtgcgccgaagggataacaatctcaggcaaacagacagagggggctcgaaacaaggcgcaaccgcgcccgaatattgagcccgcgcatggaacccacgcgcaaacaccggaggcgtccttggacgatactgctgccctgaagaaaaccccgctgcatgacctgcatctgtcgctcggcgcccgcatggtacccttcgcgggctatgacatgccggtgcaatatccagccggcgtcatgaaggaacatctgcagacccgcgcggccgccggtctcttcgatgtgtcccacatgggccaggtcgtcatcaaggcgaagtcgggcaagtatgaggacgcagcgctcgcgctcgaaagcctcgttccggtcgatatcctcgggcttgccgaaggacgccagcgctacggcttcttcaccgacgacaacggcggcatcctcgacgacctgatgatcacccatctcgacgaccacctcttcgtcgtcgtcaacgccgcctgcaaggatgccgacgtcgcgcacctccaaaaacacctttccgacacttgcgacatcacggtgctcgaccgcgcgctgatcgcgctgcagggtccgcgcgccgtcgaagccttggccgaactctgggccgatgtcgccgccatgaagttcatggacgtccgccattgccgcctgcacgacgtctcctgtcttgtctcgcgctccggctacagcggcgaggacggctacgagatctcgatcccctcggagatggccgtcgatgtcaccaagcggttgctcgaacatcccgacgtcgagccgatcggcctcggcgcccgcgacagcctgcgcctcgaagccggcctttgcctctatggcaacgacatcgacacgaccacgacccccgtcgaggcagccctcgtctgggccatccagaaggcccgcaaatcgggcggcgcccgcgccggcggcttccccggcgctgaacgcatcctctccgaactcgaccacggcgccacccgccgccgcgtcggcctgaagcccgatggcaaggcgccggtgcgcggccacgccaagctctacgccgaccaggaaggcaagaccgagatcggcgaagtgacctcaggcggcttcggcccgagcgccgaaggccctgttgccatgggctacgtaccggtcgcctctgccgatgtcggaacggtcgtctacgccgaggtacgcggcaagtacctgccggtcaccgtcgcggccctgcccttcgtcgctccgacgtacaagcgataagaccatgagcgcggcggcgatccatatcgttgcactgcctattcaggcgcactgttcgcaggccgccgtcgctggcgttgcgcgaggattacccccctctgccctgccgggcatctcccccacaagaggggagatcgacccggagcaagcgccttgccaaacggtgagcgtggagcgggccgccgctgttagcattgcgcgtggggtacccccctctgtcctgccggacatctcccccacaaggggggagattggctggacgcacccgctcgctcaaccttcattgtttgacctagacctggccactcgccgatctccccccttgtgggggagatgtccggcaggacagaggggggtatcacccggcaaagcctccaccatcgcctccacttaaaccacccaatcaccccattccccagagaggaccatcccatgctgaaattcaccgaagaacacgaatggctgcagatcgaagccggtgtcgccaccgtcggcatcaccacctatgccgtcgagcaactcggcgatctggtgttcgtggaactgcctgaagtcggcgccaccttcggcaagaacgacaacgcggccaccgtcgaatccgtcaaggcggcctcggatgtctactgcccgctcgcaggtgaaatcaccgaagtgaacccggccatcgtcgccgatccgtcgctggtcaattccgatcctcaagggtctggctggttcttcaagctgaagcttgccaacgccgccgatgccgatggcctgctcgacgaagcggcatacaaggagctcaccgcgtaatgacgacgccgacggaattccagtttaccgactaccagccctacgacttcgccaatcgtcgtcacatcggcccctcgccggccgaaatgaccgatatgctcaaggttatcggctataacagcctcgacgggctgatcgacgcgaccgtgccgccctccatccgccagaaggcgccgctcgtctggggcgcgccgatgacggagcgggaggcgctcgacaagctgcgcgaaaccgccaacaagaacaaggtcctgacctcgctgatcggccagggctattacggcacgatcacgccgccggtcatccagcgcaacatcctggaaaacccggcctggtacacggcctataccccctaccagccggaaatctcccagggccgcctcgaggcgctcttgaactaccagacgatgatctgcgacctgaccggcctcgacgtcgccaacgcctcgctgctcgacgaagcaacggccgccgccgaaggcatggcgatggccgagcgcgtctccaagtcgaaggccaagtccttcttcgtcgacgccgcctgccatccgcagacgatcgagctgatcaagacccgcgccgagccgctcggctggagcgtcgtcatcggcaacccgttcaccgatctcgacccggtcgacgtcttcggcgccatcttccagtatccgggcacgcacggtcatgtgcatgatttcaccggcctgatctcgcgcctgcaccagaccggcgccatcgccatcgtcgccgccgacatcctggcgctcacgcttctgaagtcacccggcgaaatgggcgccgacatcgccatcggctcgtcgcagcgcttcggcgttcccgtcggctacggcggcccgcacgcggcctacatgtcggtcaaggacgcccacaagcgctccatgcccggccgtctggtcggcgtctccgtcgatgcccgcggcaaccgcgcctaccgcctgtcgctgcagacccgcgaacagcacatccgccgcgaaaaggcgacgtcgaacatctgcaccgcgcaggttctgctcgccgtcatggcctcgatgtacgccgtcttccatggccccaagggcatcaaggcgatcgcccagcaagtccaccagaaggccgtgctgatggccaagggtctggaaaagctcggctacaccatagagccggaaaccttcttcgacaccatcaccgtcgacgtcggccacatgcagggcgtcatcctgcgcgcggcggtcgccgaaggcgtcaacctgcgcaaggtcggcgccaccaagatcggcatgagcctcgacgagcgcacccgcccggcgacgctggaagccgtctggcgcgccttcggcggcaacttcgccgtcgccgatttcgagcccagctatcgcctgcccaagggcctcgcgcgtaccagcgagtacctgacgcatccgatcttccacatgaaccgcgccgaaagcgagatgacgcgttacatccgtcgcctctcggaccgcgatctggcgctcgaccgctcgatgatcccgctcggctcctgcacgatgaagctcaacgccacggccgaaatgctgccgatcacctggcccgagttttcggatatccatcccttcgtgccggccgatcaggcactcggctatcgcgagatgatcgacgacctcaccgaaaagctctgcgccgtcaccggctacgacgccttctccatgcagccgaactccggcgcgcagggcgaatatgccggcctcttgacgatccgcaactaccacatcgccaacggcaacggccatcgcgacgtctgcctgattccgacgtccgcgcacggcaccaacccggcatccgcccagatggtcggcatgaaggtcgtggtcgtcaaggttcgcgaaaacggtgacatcgacctcgacgatttccgcgccaaggccgagcagtattcggacaacctctcctgctgcatgatcacctacccctcgacgcatggcgtgttcgaggaaacggtgaaggagatctgcgatctcgtgcacaggcatggcggccaggtctatctcgacggcgccaacatgaacgccatggtcggcctgtcccgccctggtgacatcggctccgacgtcagccacctcaacctgcacaagaccttctgcatcccgcatggcggcggcggacccggcatgggcccgatcggcgtcaagtcgcacctcgcgccccacctccccggccatcccgaaaccgacggccgttcgggtgcggtctccgcggcagccttcggctcggcatccatcctgccgatctcctggagctactgcctgatgatgggcggcgaaggcctgacgcaggcaaccaaggtggcgatcctcaacgccaactacatcgccgcccggctgaagggcgaatacgacgtgctctacaagtccgaggccggccgcgtggcgcatgagtgcatcatcgacacgcgcccgctggtcgacagagcaggcgtgaccgtcgacgacgtcgccaagcgcctgatcgactgcggtttccatgcgccgaccatgagctggcccgttgccggcacgctgatgatcgaaccgacggaatcggaaaccaaggccgaactcgaccgcttctgcgaggcgatgctggcgatccgccaggaagcccgcgacatcgaggaaggccgctccgacaagaccaacaacccgctgaagaacgccccgcacacggtcgaagaccttgtcggcgaatgggatcgcccctattcgcgcgaacaggcctgcttcccccccggcgccttccgcgtggacaaatactggtccccggtcaaccgcgtcgacaacgtcttcggcgaccgcaacctgatctgcacctgcccgccgctcgaggattacgccgaagcggccgagtagggatacgagatcgagacgcccggctttgtccgggcgttttggtgtttttggggatggtgcagaaacggcgcagcgccaacctgttgatatcgagccacaatccgctctcgaccgtcatcctctggctcgtcccgaggatctaagcacgcccaccaaagccgcaccggcatggacaaagccacctgctgcgcacccaccgctcctccccgccatcatcgcccgatggctcacatcccgcgtctttccgcttgcccccacccgcccgtcgctttaagcaggccgccacgcggcaatagacaacaggcgagcagtttcatggcaaaatccgacggcgatctcacccaacagccctggcctcagcccgtgacgctggcgctggaggagcccggccagtacgtcaccatcgccaccacccaggccgcctcctgggcgatgatcgaggactggccgacggaagacggccccgcgctcgacaaggcgctgctgatctgcgccgacgtcatcaagggcaagcgcagcaacgacgacgcccgcaaggccttcatcgccgcggcgctcgaggccggcatcgatatcaggaaggattgagcggacgggctgtcactcggtcggcaccgtcagcggcggccccagaaactccacgtcccatgtcttggcgaagacattgagcgccgccgtatccggccgcccgtcgcgcatgacgtcggcaagcccgaggaagaaggcccgcgcatcgagtcccggcgcgatcaggatatactgccgcgccggccggtcggtcacgttgacgaaggcatgcgcggcaccaccggggacagtgacgacatcgccctcatcggcgtaaaaccgcgcgccatccacctcgaacagataccgcccctccatcacccggaagacctcggtctccttgtgccgatggcgcggcggcccgaagccgggcgcgttgaccgtgtcgatgaagcagaacgcgccgcctgtcgtcgatggatcgacccgcacgccgagctccaatccgatcgccggtatcttgatgacctcttcggtcgctttggaatgagacatctcgatggtcatgacacggtatccttgcgggattgaaagagaaaccgccctagatggcagacacaaagctctaccaagccccgtcgagcgccgctagcctccagcaaaacatgcacgcacagcgcgtcaaacacggcatcgcgaaagcttgatgcgcgcgaaaattgctataatctccacttatcgacactcgagcacgtcaccgttcatccagacgaggaggatcgcatgtcgcctgtcatcagcatgatcgcgcgggaagtcgacctccccgccccgcgcgcggccacagccgtgatcggcccgccgaaactcttcgatccgccacggcggccaactgccctctggcattcggcgtccttgcactgacgtcgccagccttcgccgcctatgaacgtctcgtgcgccatctccagtcaccgcgtgaggacatgagaccaccaggcctgtttgcgtgatcccgtcaatcccgacgggaaacgactgcgttaccggcaacggaccagagaccccatgtcgatttcagatgccatctaccgccccttcgagcgcctgatccggccgctcgacatcccctaccagccgctgccgtcgaaagggccggtcgccgtcctcctgcatttcatctcgatgttccgcggcgtgctgatcgcgctggcgctgtcatcgatggcgatcgaggcgatgaacctggcgatcgtctggggcctgtccgtcatcgtcgacggcgtcacacagaaaggtgccgcgctcttcctcggcgagcaatggccgcttctcaccgtcctcgggctgctgatcttcccggccatgccggtcgcctcctttctcgtcaatacgctgacctcgcacacgctcggcgtcggcatgcccgccgccatccagtggcaggggcacaaggcggtggagcggcaggatctcgccttcttccatgatctctacgccggccaggtcgcctcgcggctgcagcaggtgtcgtcggccgtgcagcaacagatcatcgcagccttccagtcgatcccgcgcttcctgctgcagatggtcggctcggtggtcctcctgagcgcgctctcctggcagctcgccgtgcccgccgccatctggatcgcgctcaacgtcgcgctcgcggtcaagatggcgcccgtcttcaccgagcggtcgcgcagcaccgccaggcagcgcagcctggttgccggcgccatcaccgatctctacaccaacatgcagatgatcaagcagttcgccgccgaagacagcgaggccggcgccatccgaagcatcatcggcacgtcgatcagcacccagcaccgcgagcagcggatctatcgcacctcggagctcatcgtcgtggcgctcaacatgctcctgtggctggcgatcctgacgatcggcttcaccggcctgatcaggcagttcctgacgatcggggagttcgtcggcgccgtctatgtgctgcaacgcctctccggtcacaccttcaccttcctgcagatgggccagcagatcttccaggcgatcggcacgatcaaggacgccatgccggtgatgacgacaccgccgaccatcaccgaccgcgccgattccgtcgatctcgatgtcagccgcggcgaaatacgcttcgacgacgtgaccttcgcctacaaggccggcaaagcggtcgtcgccaacctgtcgctcacgctgtgtcccggcgagaaggtcggcctggtcgggctctccggcgcgggcaagacgacgctggtgagcctgctgctgcgcttctacgacgtcggctcgggcaccatccggatcgacggccaggatatccgcgatgtcacccaggcgagccttcgccgcaacatcggcgtcatcgcgcaggacgtctcgatgctgcaccgctccgtcggcgacaatatccgttacggccggccggaggcggcgcgcgacgagatcgaacaggcggcaaggacagcgagcgccgaccggttcatcgccgatctgcgcgacgccgaggggcgtaagggctacgacgcctatgtcggcgatcgtggcatcaagctctcgggcggccagcgccagcgcgtggccatcgcccgcgtccttttgaaggacgcgccgatcctggtgctcgacgaggcgacatcggcactcgacagcgaatccgaagccgccattcaggaaaagctcgatctggtgatgcggggaaagaccgtcatcgccatcgcccaccgcctctcgaccatcgccatgatggaccgcatcgtcgtgctcgaccagggacgcatcgtcgaggagggaagccccgccgaactggccgaaggagacggcctcttcgcgcgtctatggaaacgccagaccggcggtttcatccccgaggaggtcggctagctagaccgctcacgcgtcagccacccagcaccacggcaatgccgaccagggccaacccaaggcaggtcatggtcactcccgcgtgcagtggcctgccgccggaaaagccggcccatgcatatccggtaaagaacagcaggccggtcagcagcaggttgctcacccgcaaggcgcgttcgccatccgcgatcaggaagaaggggatgaccgccggaatggccgtcgccgaaaccagcagaaacaccgcgagcgccgcgacaagatcgtctctcgtcaaggaaagccggcgcggcgtagaccggccggcaagcgtcagcaccgaccgatagagcgcctcggcatcggcatcgtcgaccgagagcgccgccccctcggttggaaactccttgcggatcacggcaagggctgcggcttcgtcgcgcgccgtcctgatcttcgcgaacagctgcaaccgcctgttcctgaagaacgtcgtgccaagaatgcgcagcacggcgtcgatgagcccccaggcgatgttgcatccgagtgtcgagacgatcaggcccctgacatcaagcccctcttcctgcatcacgagcctggaaccgatcgtccaggtcagcgccatgatcaggccgaaaagcacttcggcgagcgcgtcgcccggatcgagcgtctcgaagatggagcggatcgtcctgaacgtcacggccttgttccaaccggcaacatccacccgtcgccctgccggcatgcgacagcgaactatggtcgaaatggccggtttcttcattgagccggatcaagggcccggatcgacggcccggatccagggttatgcggagtggctcgtctctttgccgcacgcccacgctcgccgcatgcacgttgatgaaaatcagtgctccggcaacgaaatcagcagcatggccattttttcatccccgcgctcaccgcctgcgccacactcaccccgtcccgtcttcggatacaccggttgcgttaccggcgaggcgggaccggcgctttcgggaagcccctgacgcagggtgaaacgaggggcgtcgcggaatggtcccgccagcgaagagttggtgtgcgggtgcgaaggtcggttcgccgataccacgcgcctatgcacatgagggacggcgactggccgaccgttgagcccgaaagggttttgcggaacggcgccggggtgccgcgggcgacaggtccgtggaggccctcccggcgtcgatcaagacggcccttcgggatgcccggggagcgaaagcctcaagaacaagaacaatcccgcgagcatatctctgaaaagatgccgatcacccggtaaaggaaccaggacacgatagcagaccgccgaacggggcgccggaaggtgtcaacaaaactaaactatttacgaggcagcttttggcgccccgtccgatcagataccgtatcaaccggggggaaagaccctgccgggggaaacgcatgctgttttgcaggtgggagttttaaaagtggccaacgtcagcgcccgcaaccccctcatccggctgcc

SEQ ID NO: 44 - DNA, 26799 bp, Rhizobium matallidurans
  source 1..26799: mol_type = genomic DNA
ctcgggatagtattgatgagtgtcaccgccgaggaatccgtaatagcgctcgaatccgcgccccagcggccatcggtcgtaaggtcccgccgccgaggtctgctcggctggagaaaggtgccatttgccgagagcataggaattgtatccgttctgctgcagaatctccgaaaggaagccgttttcgaagggtatctggccattcgcacccgggaagccttccgagccctcggtaatgcaggccattgcgttcgagtggtgattgcgacccgtgagcatgcatgagcgcgaaggagagcaaagtgcagtcgtgtgcatgttattgtagagcaggccgtcggctgccaatgcatcaaggttgggtgtggctattgggcttccgtaacagcctagttggccgaagccggtgtcatcgagaacgatgaacagtacattcggcgcaccctcgcgggctcgcaccggtgagggccatgcaggttgcgagacatcaaacgtgcgccctacaatgccggagaaagcctgaccaggcgtgtactccttcattgccgccacgctcgacgaggtcgtcaccccagccgccgccatagccgtaccgccgagcagaacattgcgtcgggtcaatttgatgccgtcactcatctgcattgctccgttttcgatatggttgccgatgccgaggtaccggtggtgctcagcatatcgccgcacggccctggtccgatcgacgagaaatcgaggggaataagccaggaggtttgctgccgttcgagacgcagcgcaaagatagcgggcagtcttggagcttgcattgatctaaatcatccagtcctcccgcgacgatttatcgacggacatgccagatcatcttctcttccaagagcggcgacgtcgcttgtattgccttccttgcctacagtcctccaatgcatccaactcatgtgggtttcaggtggccctaaaaggaagccctcggaagcgttgcctttccagccggtggcacgctcagatatcttccggtacgggaatccgtctggataatatagatcactcgtgtgctggcccagcctcagatacttcctacaatcgcggttcggcaagaagcggggaggcgagcgcggtttcaatcaagtccatccgataaaacttgggaatcgattgatgcacgaaaaacatccgatagacgagcggtgcaaagataaggtcaatcaatctgtcgggattaggagcaacttcgccccgacgctcgcaccggtagcacagatacagcaagtttatataggtgcacccagccacccagccgccacctccgccattttcttgttcgccagacgctctcgaaacagcatacgaagagcggcgcaagaaaagtcatcgacggtttgctcaacccagatctcaagatcgcctcgcaaactgcccgtatctggaggaactgaatcaggaacaaaccgttcgccggcgacatcattcagcagttgtgagagacttgaccaacgcctgtagatcgtggacggggtcacgtccgcacgcgcggcaatcatggcgatagtgagttcttcttcgggccgctcggccatcagatcctttactgctttatgaacggcgatttgtatacgctcgctgcgtccaccgggtcggatcagagttctagccatatgcaatatcctcgagcatcagcttcccctagcacaaggatctgcgcatacgaagagatcacggcagttggtgaaacctcatggccgcacggcaacgactggctcggggaagctctagtccgctttgtcaaggcgccaggaaagcacccctttgctgaagtcacgccctgacgtgcataagtttttgcttatcgaggtaaggtttttttaagcgactttcggccataaaattcatctcagagatgcgtgaagcatcatcatcatccctactcgcgggttcaatgttcatctgggattcggatgtcgtccatcaattccaacagttccgccgacattgccctccggacactccgagcagttgcctcggacctcacggcgacacaacgcaaagtttcaaccgggtttcgcgtcgagcgagcttcggacaatgccgcttattggtcgatcgccacgacgatgcgctccgacaacgaagcactctcagccgtcagcgacgcgttgggcctcggcgccgccatggtcgacaccgcatatgcgggcatgagccaggcgatcgatgtcatgtcggagatcaaggcgaggttcgttgccgccaccgagaacggtgttgacaaggcgaaggtcaacgacgagctcagccaactcaagaaccagctacgcgccatagccgtctccgcctccttttcaggacagaactggctttacatgacttggacgggagacaacgtggaccgttccatcgccgctggcattgcccgcgacacgagcggcgcggtctcggtccaaacgatgacctaggatctcaactccgactgggacacgcccgacgtctcctttctgatcgatgatgagagtggagattccgggatcatcacgaattccgccttcgccgataggctggcgaccgcgagcgattgggtcctgttcaatggcgcgcgccatcaatcgcatcgtgagatggagttgtccgaggacacgacaaacgacgagatccaggaaatgttggtcgttaccgaggccatggtgtcgaagatgaccgaggtggcctcgcgcctaggatcgttgtcatcacgcatcggcattcaggagagatttatcggcgatctacgggactcgctgtcgtctggcattgggcaactggttgatgcggatatggaagaagaatcgtcaaaactagccgcgaagcagacgcagcggaaactagcgatacaatctctctcgatcgccaacaacgcgccaaggaacctgctcaatctgtttagcgcttaagcccgcccgaattttctcatccatccaacgtgtcgggaaccacgacaccccgggtccggacaactgtctcttcagcctcacgccggtatctggctcgcgacaatccggcggatcacgatgagagcgatgcccgtggccccatcccattgaaacactcgactgtgtttcttgaactttcaaggtcgagccgctggccgccgccaacgatctcgccaccaacacagcgagcggcgatggcgccgaggccactcatatgaccggtcgggcgctgaacaactggtagagagcgatgacgcgatcgatgcggtgcggccttgttgacggcttccaaaaaagtgattggaagtggcgcttcgacgcctggaatgccgttaggggctccgcggcgtgacggggaaccgccacgctgtccacgcccagtgggcggaacctcagcgaatcaacctgaagccgggaggaagttgatcgcacgacacggcgcagcggccgatggcaaggggaacgaggggattggtcgtaagctgttttgcgcgattttatcgccgcgatacaggagcttactggttttgagtggcaattccgagcgcggtcggtccagcgccatcggcttcggctacaaagatctccgatcgcggccattggccatatttcgtcttcatgagagaagtccggacacggtatcgagcagttttttctcgttgtagggtttgtccagcacagcatcgaaaacgtctggatgagcgcggccaatgcttccttgcgcgccgctgacgaggatgaccgggatatgagccagctcggcgtcggcgcgcatcgcttgggcgagctccagaccggtcatcagcggcatcatgaaatcggtgatgacaagcgccgggtgcttctctcgtaccagggctagggcagcttcgccgtgcgaggcggacacgacctcataacctgcgtcttccagcatgatggtcaggacctcagcgatcagaaactcgtcctcggcaattgcgattagtggcatcaggtcggactcatgctttctttcaggcgtgtgtttccgggccgacggcggtcgccacaccggttgtcgctcctgttaccggctccagggcggaaacaaccttcaaccccttcgacccgaaagcgacttcatggatgacgggctcgtactccctgtccctcaccttcaacacggagatcgtacgtttgtagcgggatccgagttccacatggcgcagcatgaccagattatccagaaggctagagatttccgaaccgggagccgtcaccgtcgggccgaacagatcccgcaattcccaggtcgcaagggtagtaacgcccagagcccggatttcgttcgtcagcgccgcgaaaaattcaacgagacgggagggatggaccgcggcccgctcgaagccgccgagaccgtcgatcagaaggcgtttgacgccgcgcgcccggatcgcgtcgaggagccggtgaccgagcttgtctagaaggttttccgtcatcgggttccaaatcacctcaagtgcccccgacttcctaggcgtttcaaagtcgacgccaagagccttggcctttttcagcaggcgggaaggggtctcgtagaacccgaaatgcagcgccggctcatcaagggtcgcctgactaaggaaattgagccccaatgaggttttgccgcacccggagggaccgaacacaagcgtcacggagttctccggcaagccaccgccgagcatggcatcgaagccaggcgttccggataccaacaccgcggagccgagattgtcctcaaccgcggcagtcgagggaatggattccaggcgaggataggcgatcagtcccgccggggtgatttcaaattggtgaaagccaccgagacccgcgcttcccctcgacttcttgacctgcaggctgcgaacggttcgcacgccaacaagctcgttgcgcagctcgatgacgccgtcgaccatggtgtgttccgggctatcctccgcaatgcgggtgctggtcaggaacatgacagtgcagccggcgaaagcggcctggctttggacctccgcgacgaaggtcttcacatcgtaattgatatttgcgcgatcgctagtgtcgaggaggccgtcaaagattagcaaggtggccttctgccgggcgatctccttacggatgaggctaacgaccgctgaaagaccgtcatcgcgcagcgtttgaaacacgctgacgtaggagatgctcaagccaagctgcgcgcgatcgaagaattccagcgttccaagtgcctgaaacaagcgatcatgggtctccgccaaaagcgtgacatacaggaccttgccgcccctggagacgttggcgaatgcgacgtggttggaaaggatcgtcttgcctgccccgggctggccctgaataacgtaggacgcaccttcgacaaggccaccgccaagaatggtgtcgatgccgcggatgccagttggaagtctcggaaggtcatgcatgggaatggtcatccggtaggggagggtgatcgcaccgtaggtccgccggacgatattgcaacagctggtttacaaaaagggctttatttctcggcccgagcggctatgttttcctcgcgacggggcaaagcgattatcgttcgggttctttacgattgacattcagggtccgtgaacgccaatggcagacagagaccacgacggggagggcggtggcgcccaggagcgtcttgactaccttgaagcgggtgtcgctgtcgcgcggtcgggacaagacgcggctgccttccttgcggcgattgttgagtcctcggaagatgtgatcattagcaagtcgctgcagggcatcatcaccacctggaataaaagcgccgagcgcgttttcggctatacggcggacgaagccgtggggcgaccgatcaccatgttgatcccagaggatcggctggacgaagagccggcgatcctggcgcggatcaacgcaggcgagcgagtcgaccatttcgagaccatccgtcgccgcaaggacggcaccttcatcgatatttccctgacgatctcgccaatccggaacagcgacggcaagatcatcggcgcatccaagatcgcccgtgatatctcggatcggaaacgggcggcagaacatcaggatctcctgttgcgcgagatgcaccatcgcgtgaaaaaccttttcgccattaccggcagcattatcacgctggcggcacgaacggcacagacgccggccgagctcgctaccggcatgaaggatcgcctcgtcgctctgtcgaaggcgcacgaaatgaccttgccaagcttcaccggcggcgaggcgttcgtggagcaatcgacgacgctcttcactctcctctcaagcctgctttccccctttgaggacaagggggggcgatggcgactgcatggcgaggacgcgcagatcagcgccgacagggtcacgagccttgcactgctgtttcacgaatatgccaccaatgcggccaagtatggcgctctttctgcgccggaagggcgactggatgtaaccttgagctctcggcccgacagctttgagatcacttggctggagtccgatgcagaacccaaggccgtcgaaagcaaggaaacagggttcggaacgacacttgagcagatggtggttcggaccttgaatgcgcaagtctcaagggattggcaggctcacgggctgctgatcaggctcacggttccacgcgatgcgttcgccgtcccctcataggttgacgctcccaaggggaacgcgaggcgtttacgcgcgttctttgtgcggacggccggcgggcgtcgcacacaacacttttgatgccagatatatgttaacctcggccacaagatgccggacattggggaagaagacggccgatgatgttggaggacctttatcgcctgctgaggagcggacatgttcaggctcagggcgtcgtcgatacaatgacccagccgattgtggttcttgaccagcggttctatgtcacgactgccaacaacgccttcgtcaagaccttccaggtggaacgggacgatctcctcggaaaaagcttgttcgatctgggcgacggtcaatgggatattcccgaacttcgcgatttgatcgctgatatcataccgcgagcgaccgccgtcatcggctacgaagtgaaacacgatttcccgggtatcgggcagcgcaccttccttgtcgacgcgcgacgcttggtccacccggacgacaacagcaccaatatcctcgtgctgttcgacgacgtcactgagcgccagcggcacgacgccgagatggattttatcctctccgaaacccgccaccggatgaagaacctgtccgcggtcgtccgagcgcttgccctgcagaccgaggtggaaggcctcacggctgcggagtatcgccaaacgttcctgggccgtctcgaggtcacgttgcgcgcgcaggagatcgccgcccgtaatgaggcggtggaccttcatggcctgttgcagcaggcagtcggagaggtttggagcgaccgcatcacgtacgacggtccaatggttcagcttggtccctccaagatccttgcagccagcatgatcttccatgagcttgccaccaacgccatcaagtacggagcgctatcgtcaggcgagggcagtgtgcggcttacctggacgttggaagaaggactgacgggcaggacctatctgaaatgcggttggtccgaacagaatgggcctgccgttcagacgcccaggcgcaaaggctatggaaccgagatgatcgagggcaccgcggcccatcttgggggtcgtgtggaactgtcctacgccgtcgaaggtttatcagcgaccatcagaataccgttgtaggcttcatgaaccagtccgacgcttcccccgcaagctcccgcactatcctcgtcgtcgaggatgagtttttcatcgccttggaaatcaaggccgcattgacttcatcgggtttcagtgtgctgggaccggcaagctcggtagatcatgcgcttgatctgttgcgcgagacaaagcctgatgcggccgttctcgatgtcgatctcgctggtgagcgggtaacaccggtggcaatccagctaaaggccctcggcgtcccgtttgtcctcgcaagtgctgccgacccaggcgcacttgcccagaacgtcgtcctagcaggcgtccgcaacctgggcaagccgaccgacatgcgacaactcgcggcggcagtggccgaaatcgcggcgagcgatgggtcgtgagacggcgcgatagtcaacgcgctggtagatgcctgctccggcgaagctcagtttgggcagggccgctcgggccaaagctgccctatccccgaaaccaagcgctctcttagtcatgcggataaggagtaagcctgaccttcaacctcccgcagacctcaccaagcggtcaagacgcggcgggggcaatttcgcggagtctgaagcgcgccactcgcagtaaaagttcaattttattaaagttatttcaacagaagtgtggctatctttagacaatattggacctggccatgatgagcctgcgacgaggcaactcggcggccagcagattgcttccataagcattgacgcgagcggttccagcacatccggctgtcgttcgtattccacccgtgaagacgtcagccgcaacgcaagtgggggcgactgtgactttttctatccgcaatatcctggttggaatatttcttcttttaagcgcggtgatctgtgtgctaaccgcgtcatccgccatagacgcatacaacaaacagcaggttttcagcgatgtatcgaagctgaccgctcttgatcgtgccctgttccagacacttgcaaactttcgcaatgagcgtggtgacggttcgtccgcggcaaagatggaaatcgacgcactcgccggcacgcttgcttcgctgaaaaaggatcgcgggctggtggacagcgccatggcgaccgccaaggcgatctatgccgatgtcgacgacagcgcgatcaaaccgcagatggcggacatcatggatacatttgaccgagtgctggcatttcggacaaagcttgatgatcagctgacgaaaaagctggtggaccgcgacgctgggctgcaggacactacccttaaccttggacaggagctgttgacgtcgctcgaaaccggatcgacaacaatcgaagcccgaatccgcgaaagcgatccgtcgatgacggcgatgattcagatccgctcattggcatggtcaacacgtgcgctcgcgggcgcatcgaaccttcagctcaacatcacgcttggcgcaggtgcgacgatgacagctgcagagctcggcaagatccagctcaacgactatgccgtaacatttgcctggaagcaggtcggcgtcctcgtgaaccacaaggacacgcttcaaatcataaaggacgcttaccaggccgcccagacgggttacttcgggggtgaatttgcgcccaagcgcgcagcacttctcgaaacattttctgcaggcaataaggcgccgatgtcccttgatgtctggcggccgatgggcaatgaggctcttctcttcatcaccaataccgcggccgcggcagcagacggaatggtcgccgcggccgccaccagtaagtctcaggcattcgccaacttcattgtctatgcgctgacattcatggttgccgctatcgtcagtgttgtcggtatctgcgtcatcatcttccgcgtcaccaagccaattggcgtcatcacacattcgatggcagctctggcgcagggcgatctggagatcgaggtcgccggtgtcgcccgccgcgacgaaattggcgaaatggcgcgttccgtcgaggtcttccagcaggcggcaatccgcaacaaggcacttgaagagcagacggccgaggcgcgggttaccgcagagcgtgagcgtatcgagatgcagcggcgcaccgaggccgaagccgaagagcgcttgatgcaggcaacgggctctctcgccgccggcttgcgccgtctcgcggcgggtgacctcgtctgtgaaatcgacacgccgctagcgccgcagttcgaggcacttcgccatgacttcaacacatcggtcaagcagctccgtgatgctctgcggagcgtcggtcaggccgcatcattagtcagcaccggcagctttgagatctcgcaagcgtcggacaatctgtccaagcgtactgaacaacaagccgcctcgctggaggaaactgccgcggcactggaggaggtcactgccaatgtgcgatcgacctcccagcgtgccggcgatgcccgcgatcttgtccgcggtgcgcgttcccgcgcggaaaactcaagtgaggtcgttaataacgcggtcagcgccatgggtaaaatcgagcattcgtcgaggcagattagccagattatcggcgtcatcgacgaaattgccttccagaccaatctgctggcgttgaatgctggtgtggaagctgcccgtgccggtgacgccggaaagggctttgccgtcgtcgctcaggaagtgcgcgagttggcgcaacgctccgccaatgctgccaaggagataaaaagcctgatcggcaattctgagctcgctgttggcgagggcgtacggctggtgaatgataccggcgacggtctttccgcgatcgccgagcttgtgcaacagatcaatcaacacatggatgctatcgctactgccgccaaggagcagtcgatgggattgtcggagatcaacagcgccgtcaaccatatggatcaggcgacccagcagaacgccgcaatggtcgaacaaatgaacgctgccggcacgggtctcgcgcaagaaagcgcccgtctgggcgaattgcttggcactttccagacgggtgatggaggcacaccagccgccggttatcgcgcgacggctccttcccggaggcttggccccgcctctgccagcgcgccgcaacccgcgtcccgctcaatacccgccacacgaggcaatgcattgcttaacaagctgcagcaggaatggtcggaattctgagccaccccccttgacattagcccgggcagcgtttgcccgggccggattccagtcgccggcggaggggagggcgcttcgtccaacgagtctggcgcggcaaaaccggggtatgaccctgtgctgaggttgggcttaggccccgcagcgtaattttcgcagtttggcgggggccacgtctccatagcgagaagaaagttggcagggcgcctgctcaggaggctgccctgtgtgggtttgacggtgatggtgatcagagcttgccctctgcgagcagttcgcgggtccgcttcagcgtagacagcagcgcggacctgtagcccttgtcactgtcgaactgggcctgctcggcctgctcttcaggtccgttcggttgtttgccgcgcaaaccgagatagcagtagaatttgagcttcagcgcgccgtcttcgtcctcgaacaattcgttgacgatggcgccttcgcgcgggccggtggcctggaagaaggtgaccttgctctgcggctcgagcgtgatgatctccctgatgtcagagccggcgatcgtggcttcgcgcacgaagtgggtggcgctctcctcgacgacatcgcagcgggtgcaaaggcccggtgggagaaacaggcgcgcatcgcgcgccttcaactccaagcccttccagacctgctcccgggtgagctttggttcgccttcaggattgaccgggacggttgcggtcgaatagatcatgatgatgttccttgttcgagatgtgggacggcccgcgtcagacagaggctgcggtttccaaggcgaagtcgcgataagagcgcagtggacggccgagcagggccgtcaggcgctcgacatcgccatcttcaggcaacatgccgtcagtcaggaagcgctcgcccatcatgcgcatgtcgtaggccatccaggccggcatgaactgcttgaggttctgctcgaaggctgcagtatcatcgccgccgtagttgatctgacgagcgaggacatccgtccagatggccgcgatattggctccggtcaaagtctcaggaccgaccaggttgatccgcgtgagagggagcggctgtgtggcctgctcgtgacgcagcagctccagggcggcgatctcggcaatatctcgcacgtctatcatggcgagacccttgtcgccgacgggcatcggatagacgccatagccagtgatgacgtccttgatcgtcagatcgttctggatgaagtaggccgggcgtaggatggtggcatgaaggcccatctgctcgatcatccgctcgacgccgaacttgccggcaaagtgcggcacgttgacgtaggcgtcggcgtggatcaccgataggtagacgatccgttttatgccagccgaccgcgcaacgttgagggcgatcacagcctgggtaaattcgtccggtacgacagcgttcagcagaaagagcgtagttacgccttcgaatgcgccgcgtagcgagtctacatcgaggaagtcgcccttcacaacggcaacgcctgctgggaagtttgccttagagggatcgcgaaccagggctctaacgtctgcgccgtggttgaccagatgctggatgacttgcgcgccgatattgcctgtggcgccggtaacgaggatggtcatggaagtgtctccgggttgtttgcttgacaccccgaatatggatggttcactgttggcccgatagacggacaatttagacgcattgtctcacaggtggaacactcatggacctgcttgctcttgcggactttaatatcgtcgcccgccatggcggctttggcaaagcggcccgcgccactggacggccaaaggcaacactgtcgcgacgcgtcacggaattggaaggcgcactccggcttcggctgttcgaacgcggcgcacgcacactcaagctcacggaagaagggcggacgctgtacgcgcgaaccgccatccttctaacggagctggacgagactgcggcgatgatcgcttccggtgcggagaagccccgtggccgattgcggatcagtgcgccgctcctcttgtcgcagaccgccatgggcaagatcgcggcaggctttgcattgaaatacccggatgtcagacttgaaatcaccacggaagatcgcgccgtcgacatgatcgaggaggggtacgacctcgttatacgcgtcaacccggcgcctgatgaaagcctcgtcggtcgcgcttttctgcatgatcgccttgtcgttgtggcacgtcccgatctcgcacgacccgctgacggtctgctagttccgggcgtcgtccgaggagggggagctacagagacctggactgtcatgacctgcgaagggctcgctgagatcaggatcgatcccgtcctcgtgctatcgtctctcatcatggtacgggatgcggtgagggcaggcgtcggtgccgcacgcctgccgatctcgctggtgagccacgatatcgttgatgggaccttgcagcactggggcgacatcgaaggctccgagatcgcactctgggcgctttacccgtcgcggcgtctcttgagtgcgcgggtctccgccttcctcgatttcctcaagcgggcctttcccaaggggacacctgaagagctggccgcctatatcggccagtaaggatcggacgcgctaagccgcaacagcaactgcgcgcgaataggcgccaggtggcatacccacatgccgattgaaggcaacgctgaaggcgctggtcgatccatagccgacgcgctgggcgatctccgccatggccatatcctctcggagtaactcctttgccagtgccatgcgccatccggtcgcgtattccatcggcgcgataccaacttcctttcggaaacgatcgaagaaggtcgaacgagacatcgcggcttcccgagcaagcgtttccaccgtcatgccgcgacccggatcagcatggatccgacgcaaggtcggtgccagcagcggatcggccatgccacgcaggaggcccggtggcgccttggcacttgcgggcgatcgaagtgcgtcgataaagagaacctccagcaaccggtgaagcaccatctcacgcgcgacacggtcagctctcgtttcttcattgatcatgcggaccagagcgaccaatcgttcctcaccgtgaacgtggatgacctccggcagcagcgacacgaggagagctttgtcatccgaaccgaacgcacaatgcccgacgagtgccctgatctccgccggcgcttccgggtcgcccaggcgaaaaacgccggggctcgtctccagacgctgcgcaagtgcgccgcgtggcggcggctccatgctgctcatcgtgaatgagaagatttttgggacgaggacaaagtcacccgcagtgagcaccattggctcacgaccggcaatcgtcatcaggcaacggccctcgacgacggcgcagtagaaggggcttccaagctccgtccgctcgacaagccactgaccgccgcctgtcaccagctttgaaatcgaggggcgtggcttgagtagcgaaacaacttcagcaacgggatcggtcatgttttcggactcatgctaaatactcttggatatacgaatatagcaggtccgcgcaatcaggtccatctttagcgtagttgaaagccaggagagagaacatgcccaagatcctcatcaccggttgctcgtccggtttcggcctcgccatcgcacggaaattcctggacgccggatgggacgtcgtcgcaaccatgcgcaagccgcgaaacgaccttcttccgtcgaacgacaggctcgaaatcctgccgctggatgtcaccagcgcggacagcattgctaaggctatcgaagccgctggcacggtcgacgcactagtcaacaatgccggcgtcggcatgctcaatgtgctcgaaggcacagaaatgtcgaagatccgtgagctgttcgaaacgaacgtgttcggtgcgatggcgatgaccaaagctgttctcccgcggatgcgggtccgtcgctcaggcgtcatcgtcaacgtcagctccgccgtcacgataaggccgttgcccacgctctcggtctacagcgccagcaaggcggccctcaacgccttcacggagagcctcgcgtttgaagcggctttgtttggcatccgtgccaaacttgttttgcctggctcggcgccgacgaccggcttcggcaagaatgctgtctcgcgcatgggcatggaaatccccgagccctacgaagtcttcgtccacgactatatgacgaagctgcgttcgggcactgagtttacgacggccgacgcggttgcagaggccgtctggcggtcggtgacagagatcgacgcgccgatgaagatcccggcaggtgccgacgcggaaacctcgttccgccaagcgaggcatttgctcgcctgaatcaccatccacaatccacatttgaaggtccagaccatgaacaatctgatcaatctcgcgaagcatattccgacgcctgaagccgctctcaccgtggcctacgcgccgatccgtctttcgatgccgggccgccagccgctggaactgcgtgtgacggcgcccgcaaacggcgacaagcttccgattctgttgctgtcacatggctacggcccatccaactatgtcccttcaaaagatggctacgctccccttgtccagttctggacggaaagagggttcgtcgtcatccagccgacccacgcgagttcccgggtcggtggcttgccgtcggattcacctggcgcgcccttcttctggcgcgagcgtgttgaggagatgaaggcgatcctcgaccaactgccggagatcgagcggcaagcgccggccgttgagggccgaatggatcatgcacgcatcgccgcggtgggccactcctttggtggccacacagtcgggctcctgcttggcgcgcaggtggatggcgaggacttttccgatccgcgcatcgcggccggcgttcttctgacaacaccgggccggggcggcaaggatatgacgcctgagagtgctgcacggtttccgttcttcgacgttgatttctcgacactatcggtacagagcctggtcgtttgcggcgatatggacaacccccactttacgactcgcggccccgaatggcatgcggatgccttccatgatgcgccgggcgccgtcgccatgctgatgatgcacggcgtcgggcatggccttggtgggatcgcggcgctcgacgcgaaggaaacagagaccgaggcaccggacgtgctggaagcgacacggcgactgacgctcgcatggctacagacggcgctcggcgcggacgaggaggcttggccgagagcatgcctcgcacttgaaaccgaagcctcctcgcttgcgaccgtgaccaagcaggcctgagaactgctgacggtctcgaacgccggtgctcgatgctgggccggggcgttcgtgggtcgtggcgggtagagtgcgggcgggggacaccccgttttatcactattggataacttgcgcgcatgtcgtgtctggccaatttacagttctcggagacttccatcctcaagctgttgattaaagccgaggatcggcggcgtgatttttgcgcgaaagccgtgcgctgcaattcggcgttttccagcccatgggaagcccctcttgcgccaccatctccattgccgaaacggtggtgtatattacatcctgttgcacggaaaccggagcgcaataagtatgactacagccctccgcaaaatcttccgcagttgtggaacaacctccgcgctgcagtccatgatcaacgacaggggtcgatgatcgatctgggcttgcgaatttttcccagtcgctctggccgaaatatggcgcgcactatgtctcgcgggttgtaaccctgatcaggaagatgtgatgataagccctcacgacttggacagcttcgagcttcgggcgctcaagaacttagtaaatggtgaaggcgcttacctaacagaatcgatggtcaagcgactgatgtctttgtcattggccagccggtccggcgatgcgagatcctcgcctcggagcttggaaaagaagtcgtactgcagtcccgtatggcgctcatctcgttagtggatggtggagattgcgggcagacttccccattatccagctacggtagagtggggaagatgagagctcctcacagccggaccagtaacggagcaggcgattatctgttccagggataagtgaatgtggggagcctagagagtaacaggcgctcaaggcccgccacgtggcgagcgtgggagtcccacttgaccgataacccggatggacgcgacaagctccgagaaggcccggttctgttctctcgccgttcctttcctgtctcaatagctgcgacatggtcgattgagccgtgtcagctcccagtcgttgtcaggggctggagcaaacgacctactatcagctcctgggtttgagctaactcaagtcttcccgtccatgaccccccagatgaagtttcacgctttcctcatgtccgcgaacagcctatcgtgataggctgccaaaagttccggcgcgctcttccgcgcgtcacttccttcctgacgagcggcggcccactcataggctaagaagagggcttcgatctgagcgcccgaagcgtgtctacgttgctgtctcaaggccggcagtcgcaacatcagcttcttgcggcaagctctcgctctattcctcattccctatcaagcacctccgctcctgaaacctatgaggctttcaacaactctagccgcttgccagcaagatcaattaggccttcgtctctgggcgtgtacagcgcgtcgactgtgctgtcccgacgaaccccctgaccaatggggtggcccgatctcccgtggccgccccgttcgcggaacgtgttgaaagcgtgccccggcaacgggttttgttgtgattgtcggatgtggcatcgcctgccccttcggtctgccgttccaggttggccttgcgggtgagatcgttcgattgctgaagagaccgagcctagcgaaacgtcgggatgacctggttctggatgtcgggcccgaaatcgatcaccaggttgccgcaggacaccatgtccttgcgcaagaacggggggtcgcggatcaggctgtgcggggagaagatggcagctcccgcacatcggctttaaggatgtagcttgcgccatctattcggaccaagatcacgccgcccctcccagacgccccccaggagatggtcgctacaacgggcctgacgtgcacggccagggcgcgcccgtcaatatcagtggcgatctgaaccttcgggttgatcgagacagttgcaatattctctaccgtttaatccggttcaagacaaaaccgccaatccgcgagcggcgaggacacatttgagcggtcgtcccgcgtcgccccggcaatgaagtccatctcgcatatcggcactggcgctcagtgaggtttgccaagcgctggagcctcctcgcatcttgattatcctctcctaaaacacaaattacgcggtacagctcttgtgtctggaggagagaaagtggcgcaagcctatacggccgacgatcctgagacccgcctggcgctttttgattttgccttcgagaacgctccaatcgggatcgctctcgtggatctcggggggcgcatcattcgcggcaacgccgctttcgccaagcttctatcgcttcctatcgacaaggtgctcgggacacatttcaaggacttcacccacccagacgatatcgagacagacctaatcctgttccagcaggtcctgcggggaaaacgggacggatacacgatcgagaagcgctacctaagaccctccggcgaaatcgttcacgtcctgatccacgtggccgcgatgcgcaatgccgatggcgaggttgtacgctttatatcccagatcgaagacatcacgcgccacaaggagcatgagcgtcagcttgccgagcgggcagcgcagcttgaactggcgcttgaggccgtccgtggtggcttctggcagatggacatcctgaccggcaagttcgagacgtccgatcgactggctcagtttatcggcgggccgaccgccgcgcggctcgacctcgagcgctacgtcaacagggtcaacgtcaatgacggcgcccaggcggatctgacgccgctgatcacaggtaagctcgatcaaaatgtcgcggagtatcgtctggagaccgttcatggcgaacgctggatgcgctgtgatcgccgacttttacgcgatagcgacggtcggccggtgaaaattatggggatggcgatcgatttcaccgaggagcgacgccggatcgagatgctggaggagacggcacgaacggatgcgttgacagggttgctcaaccggcgtgggctgtcgatcgaattcgcggccttgcaatccgccgctggcgtcgctgtccttgccctcgacctcgatggcttcaaggaggtcaacgatgcctatggtcatgccatgggagatgtcgtcctgcaaaccaccgcgtcgcgcctgaggtcatctgtcagaggccaagatctcgtggcacgtaccgggggcgatgagttcgtggtggttatcgcgggcgaccaacccgcgggggaggcggcagctcaacggatcctcgcgcggatgagggagcctatcgcgatcgccaatcatatcgctgacgtccgcgcgagcatcggcggtatctggacgcccgacaagcgcgacgtttcggaactgctaaaccaggccgacgcgcttctttacaatgcgaaggcggccggcaaggacgccgtgagatttcagtcggcgcccaacagggatgaccgcgaatatccgagatgagtgctacttccgcgatgtacgttggatctgtttgatcgctgttgccggagcgaactcatcgcaaggctttcccagcgtgaccacatccgccatcagcttgttaccttccacccggggatgccggtggcgcccacgtcgacgggctgttcttgcaagatcgcaagcgcatcctccgcgttagctgcactttctgtcctaccgtgtccaacatgtcctggaacagtcgttaggcatcgtcggatccatttgtcacgatcctcgctcctcagttatctatccgccggtgccgccagtccttatatggcgccaatagctgtccaggaaatcgctcctcgatcgcggtttcgaccatcgcgatcctgacaaagacctcgctgctgtcacgctcttcggagggtatgttttcgctttcgtcttcgagtttccgcatcagcgcgaacagttcctcatagggcatcgcggaaagttggtcctcgaaccccgcggcatcaaaatcttgttcctctgccatagtctcttggctcctctgtcctcgattgatttatcgacaacggtctggccgtcaacgagttcaatcaagattgggatatggtggctggtgtacggcggattgaggcagataacgatagcgtcgatggctgggacacgactgccgttcgttggccgcaacacccctgccttgattggcattggcggcggtgcgtttgggtttggtgtcggcggccgcaccagccttgcgaagtccggcactctcgcggagggccgcgagcagatcgtttggcttcgagacctcgaccttcttcgccatcgatgatcaccgcggggcctgggcgcgtacggtctgtgcgatcgctgcaaaccgatttgtccagtcatggccaccgctcgtcaggtgccacgcgccattcggttcgacatggctgtcacgacaaggggcatggatgccaacgccgcaccagaggccgattgcccgtatcagtctcattaacaggcgcgcagcgagtggagagagggcgagtacgtgggaacgccacaaagatcctgattcttctcgacttcaagatgttgacattacggtcaagcattccacatcgctcactttagcttctgtcctcggactgcatggagaattgatgaatggccgaactaagagtttatattggatgggattcccgcgaggatattgcctaccaggttgccaaggccacgttgctcaagaacgcatcaatcgacgtcgaggttcaccccatcaagctgcaggagcttgtcgatcgtggtgtttacacccgtgaagtcgatcctctggcttcgaccgagtttacctattcccgtttcttcacgccgtggcttgccggctacaagggctgggcgctgttttgcgactgcgacttcctgttcttcggcgatgtcgccgacctcctgcgctataaggacgacagcaaggcggtcgcctgcgttcatcacgactatacgcccaaggagggcgtgaagatggatggcaaggtacagaccaattaccctcgcaagaactggtcctcgttcatgctgttcaattgcgagcacccgtccacccgccagctgacacccgagctcgtcaatgcacagaccggtgcctatcttcatcgtttgcaatgggccaaggacagcgagatcggtgagattccggaggaatggaactggctggaggggtggagcaccaagccgagccaaggccttccgaaggccgtccactacaccaatggcggcccgtggttccacaattggcaggacgtcgaatacgcggatgtctggctggaaacggcacgcgcgctcgacccgcgtttcgcgcctgtgtgacccgtgaacctcggatttctggtccgcctccgcgccgccttgtcgggcggtgcgctgcggatcgggacgagaccgaacatgcggtatctgccagagcttcgctatcggcacggcaagatcgaaatcggtgaccggctcttcacccgatgtggcgtcgtcctcgatgcgcagagcggcacgatcgagatcggcgacgatgtctcgatcaacgattactcgatcctgctgggacatggcggtgtgagcatcggcgacaataccaggatcgcggcacacgtcgtgatcgtctcgttcgagcacagctatgaggacgcaacggtcctcatcaaggatcagccgatcaaaaagggcagggtggagatcggcagggatgtctggatcggcgcgggcgccaaggtgcttgctggcagcaacatcgccgacggctgcgtcatcggcgcgaacagcgtcatcaagggggcgacggagccattcggcgtctatgagggctcgcccgcgcgcctggttaaaaggcgcgccttgcccaagacgagagggcccgacacgacagggagggaacaatgatcgacagagatggggatgcacgcttcgagaaggccaaccccgctgccgctgccgcggaggagtggaaatccctgctggcggactatagcgatgtcgttctggtcgcgaacagcgatgaggtgaacatcgaagacctcaaggcgcgctttcccgatacaacgctattcatcttcttcaacaaggtcttcaaggttctgagcgagcctttcacccgccattccatgctgttttcgagaagcggaacgctgggcgccaatctcgtgaagagtggcaaggtcgataaggtgctaccctatttcgacacgcgcaccttccacggtgtcgtgaacatcaaggccgggtccgacgagcagctgagcccggcatcggatttcggcgacgtgcatgtcaagcacctcgatctgactgatgtcttcacgccgttctatccgcgctcgagcgtgccgacgacgggatttgcgctctgcttctggctgacgacacttaatcttggcaccaggataacgctggctggcttctcgtcgaagcggagcgagcgctacaaggttttggatgttcacgactggacattcgagcaggtgctgctgcggctgatgttccgcaagggtaagatcaatattgtcgggcgcgaggcgtccaacccctatgcggatctctccgcgcactttcccgaattcacacccgccgatatcgagctcaccgccaatgagatcatcgacgaacggctcggcaacctgagttcgatcgtcgatcgcctgatggatgtcacccgcttccttcgcttcctggatcggacctggaagagcttgaaaccaaggtcacgcaagcaacgccagtgggattccatggaaaacaagcgccggtgaaccgccggcttggaggtcgccggtcgttcgcggcgcggttccagttggacccgagagcccacgacgcacctcggacacgatcaacgcgccaaagtcggcgtgcgacaccatctacttcgccggagttcgtcgcgcttaagtaagaaatgatctgtgttccggccttgccggcaataccggtaacggcgataccaagccaagcggaaacaagcggagacaagcgcttcgcccgcttcacgggactaccgatgatccaccaacgtgatacgcaccctcacggcgcggcccatttcgaacggctcccgaggggcgacaatctctgtaggagcattcctcggtggtcggctgatgtcctgatcggggcgcgcgccgattgttcaaggagaccgtgcgacgtcgcgagacgtcccgcagctttcggcacctccccgtgcaaagggatcaagcatcggcacggcggggttcgcctttacatcgatttgaactccttttccccgaagcctgattgcctctcgcgcatgggcgcgggccttgatgcggcggagcttgaagcatcacgattttcacccgggcgacgtcaccggcgagcggtactcgcggcccccgtgcttttgtccgccggaatcctgctcgccccggtgatttgatggaacgattccctcatctgcttgttcaagacggtctcttaccgattggaattccacttgcgtttgattattgtctcactgggatcgctgacagcactcacatggcttctcgcattctattttgtactagagctgcggatttgacggaccggtccccaatccggttgaactggtttatacaagggttgttcggccaggttgaagttaagccgcccctgggaattgtcccgcccaagaattgctgaaatattccccgcttacgtagcctttgcaaaagattcagcaattcgcggtaagtaggcatcgataaatgactttggtgccagatgacttccggacttgatctcccgaccgtgctctttctgcagaaaacgtcctatatagccggggccttgaccttgggctatctgcggcggacatccacggacagtcgaggtgtcgggcttctcgcggcaagcttcctgatgctggccgcgggcgcgaccttggcggggtacgcggaactttacccagccctctacggaaccctcagcctcgtcaatatcgcattggccgtgtcgggatatggcctcctggcgttggcgttcgttctgatcagcaatccagggcggaagttcaatacatggtacgtattccttccagcggctgggaccttggtggttggtctggcgacggattttcatctggataacacctaccgggcggcgacttttaccctgctaggttgtctaacaatggcggccgctgcttgggtcgtgcgccgtgatgcgtctcgcgagcccctgccgatccgaagactcgtcgccgcgatactcgcggccaccagcctgctatcgttggtcatgggattggagttttccttccaatcgttcccggttctcgacgtggtcgagggcttttccctaatgatactttcgaagttcgtgcttgccatcgcgatcgtgatgttcataagcgaacgtcagcgcgtcaagattcagaaactcgctgaccttgatcctctgacagggctccacaatcgccgctccttcaacgcgaacgcaccgaacaacccacagcctggtgacgcggttctgtttctggaccttgatcatttcaagcagctcaacgaccgtcatgggcacgccctgggtgacgaagtcctttcgacgatggcccaagcggtccagtcggtcctgccgccatccgcgttgcttgcgcgtcacggaggagaagagtttgtcgtcttcctgcccgcgagcgcgggtgacgccctccttcacgcggagcggatacgcaagaccgtctcgggccttcgcgtttcgagcctcggcttcgaggtcaaggtgaccacgagtgtcggtatcgcgagggcattgcaccatgggtccaccctccaggatctttgtcggcgcgcggatcgcgccttgtacttggcgaaggccgctggacgagaccgtgtttgtgacgctgatcgggatattcttcaaaaagaaattcacgaccagggcgtgggttcatgacgatccgtccaattaaggggcgcggccctcggtcgtagccagaacgcggcgcgggtccttgtgacatcatgggcgggagcctgtaacttttcgagtttgttggagaaacgttcgatcaccttggtggcgatggacccgtgcagctgaccccgtgcctgtcgttttccaacgacgtccaacggatgcacgaagccaacggacgaagctaggcgcaagccggcgactggctgggttccagttcctcgaaaagtccggcgcggccaaggggatccccgcataccgacagtgtgggaccagcgctactagggtcgtagcaccctgggtatcaacggcggccaatcctaattgggtcgggcggagccaccgtgaggcagctcgaacaagtggcggatccttacggccaaggaagtcggctggtttgccttggggccggtgacgccttccgctaggtgcttctcggactcgacgcgtttcgcgagcaactcgctcagctcctcggcgagcgcgggtctatcatgcatgacggtcgccagatgggcgcgggaaatctcgtagaccacaacgaatgtaagtgcgcgcatggtggcgggttcggccgctcccatgaggacgccgcgctcaccaaacagatctccgggcgccaagcgggtcagctccaagcgcacgggacccgtcacgtcctcgacgaccacgacgccgctccggacgatcatcagggatgtcatcgatgcgtcttgcggagcgatgacggtgtccttcttgtatgtgagacgctgcatcgtcgaagcaagcgcttccatctcgtcttcggtgagcgtcgagaacagtgggattgaactgagtagccgccaaggcgtgccagggtgcttcggagacacttcaaatgcttgcccggcgtcgagctggatgttggtcgaacccgcgaactggatgcccgccgccttggcgtgccgatacacgaggtcgtatatctcattcttggccgttccggtgcgcgcgaggctggccaccttgaacgcaagctcgacctcgatcgccgacccgtccaacccggtgatcgacactgaaggagcgggtgttttgaggatggtgttcgcgctgaggaggaccgccctcatcgcttcctcgatgatcgcgggagcgcggttgggcgtgaccctgactgtgatcttggccccgtgcacggcatcgttgcccgttaggtttgttagcctggctttcgccagtgcgctattaggcacaatgacaaggtcatttgcgtcattaagtaagtgcgtggaacgccagttcgtttcgacgacttggccatgtaccccgtcctccagggcaatccagtcgccgacgctgtacgggcggccaagattgagagcaattcccgagaagacgtcattcaatgtgctctgaagtgccaggccgagcacgatcgcgaagacgccggaggtggcgatgagtgtgccaacgggaaggctgaacacgaaggcgatgatcgagagcgccgctcccaggtagatcaccgcgacaagcaggtcctgaatgaggcgtccttctctcggctttcgctcgaatataaggaaaagcc

SEQ ID NO: 45 - DNA, 22125 bp, Rhizobium matallidurans
  source 1..22125: mol_type = genomic DNA
ccttatggttgatcgttcgtctaccgatggggccactcctatgcttgtcctcgtggctctcttccccaattagccactggcccatgccgggggatttttttagcgtcgtttcgaacgctctgttggaggggtatccgctcgaaaactcatctggtcgcaccgcggaggggactgaatggtgaagaaggaaatcgacgagcaggtcgagaattcatggcgcggatcggcgtgaaccgatgtcaggccgcggacaaaccatttctacagcagcaatttcttcaaaaacggcgatcgagaacgacttgaaacctagaaaatcacatattagattttcgacattgatcacaacttggcgcagcgatggaggatgttatgagccccgttgatgttctgtgggcaaaccctgtgacgatcaggctgacaaatggcctcgagaggtcgttcagcagcatttcggatgccctggatttcctggagtccgaatggccatctaggcgtggcgcatatcacgatgcagcagttgttacctgccgtaacgcgctaaagaaaatgacgcctccgaccgtggcgcgtgagtacttttccgcggcctgccttgaggcaggcttcggaccgaagacaggtacgcgcgtggggcatgcagcgacaggtagtttccatgcaaaggctcacagttcgcatccgtgatctgttggcgtcgtaaaagtctggctcagggctaagctgctttgggaattggatgcgcgcacgtccaattcccttgcatcaaccgtgtgttgtcggtgcggagaagctcgggaagggtttccgggcttctttttccctacggatgtagtcgctcagaccgcaccatggtcctgcacctcgtgcagccccttatacaaggcatggcgcagctgtccgtccctcgtcaaggacaacgcggatgcaccagcctttttgataagatgaccaccgcgcccctcgccggtacattggacaggcaatcagaggtcactttgctatggcactcgaaaactcaacaatcagagaccatatccagcgaacgctggacaccatgaatcgccttgatacgtctgccgacataagcctacgacatcagttctcccagatggtgggagatcgatatgaggcgcttatcggcctcagcgtggtcgagttgcggcagttggctgccacaaggtaaagcaagcaatagacggcgatcagatcgccttctggatgtcggccatatcgtcgggcaggatgtgcatgccagccgcgtgggcggcatcgacgaacgcagcgcgggcagcggcggatcggcggcgccatcaccatggcgtcgatcgatctctccagcgcgctatgaaatcccggatttgtcttatccggctgttccgatgtcaagtagctgatcatctcctcgacggtctcggcgggagcatactgcccaacgcggcggatctcgacttcgagcggctcgatcggggtaagggaaaagctggccatgacgcgttaccttcgactgacaggtgatgcgcatcaactgaccccgaagtgattcgtttcgcgtcaaatcaatggtttgcagatattggcttgaaagcctagtcggcggctatatgtaaccacttgctcttcgaagaatggttgtcacctatcttctctcagttttcggacagcgcacccaaagggagcgatgaatgtctggactgacccacttttccaaaatgtcgatagcgcagcgcgagctctatattgagacgttggccaggagacttcgtgtctctgcctcaatcgccaaacgtgatggcgatgagctgtggtggatgctggatgaactcgcggaccagctagacacgaactatctgggtatggctgaggactattcggcagctgccaatgatgtgatcgaaaaagcgacactgttactcgcaaagtttgagtgggaccttctgaacggtacgattcattaaatccatggaaccagtgggcgcgatcgaagttgtccggagccgcgtcaacagcctttccgttgcggctaatctggatactctttgaccccggctaagaacgcgccgcaactacattagcgatttgcgctgcaacgaggaactgtttgcgaacgcgaagcccagcaagaaaagcatcggacccgggaacgttcccttcgatcacgtgtcttagcgacagccgcgtttgccccccgattcgcgcgcggctaccctcgctccagttaaccccgctttgtgcggggtttcttttatcaccgacacaggctcaatcttgctctcgctagcagatcggctaccatggcctggtcgcttggaagtgccctgacacgcttgagtgacaggcgaagggctcgttgccccctaaaactcgaagcccttcgcctccggcagtgggacgtttgcctgcgcctggcccttgatctcggccgcggcgctcttcctgtcacttggactgtagtcacccacgaagaccgggagtaatgcggaagcggttagcgtcagccagttttgcttcataatccgcgatctcctgttccatgcggtcattgtcggattgttccgcgctgagagcggcttcggcgcgcttccgatactcgtcaagggcctgagcgcctttgggacgaagatcgcgctccttgttgagctgagcttgcagggcgtcgtatccgtaggctgaaaggctgaaaccatggtggctttggtgatgcgcacctgctcggccgcatacgaatcgaccttgcccggcggctttaaccgtccgttgcagatcgcgaatacaggatgtttcatggcaaggaagcggtaactgctgccaacgcgccgcggcagaattacaaccgtgagaattgaagtgtgtgagacctgcctctgtggatcctaccgttagagtgtctgtaccagcgcctgcgaagacgtcgacaccactacctggtcacacggggctcgtatcgcgggggctacacaccccttgatatgtgcttttcccaatggaccatggcgccaggcaatctgcgtcacgagatttggcaatgatgcccttaggcaagtgctcgccgatcctagtcaccgcgtctttctctttttcttaacgggttcatcgctgagttcgatccagacgggagcatggtcgctggtgtgttcccagccgcgtacatgcttatctacttccgccttcgccaatctctcggccgcctccgaactcagcagcaaatgatttattcgaagcccggcatcgcgggcatacgcgttcctgaaataatcccagaacgtatagatgcgtttgtctggatgcagatgacgaagggcgtccgtccacccttggccgacgaggttcttgtacgcctcccgcacctcgatgcggaaaagggcatcgtctgtccagcgctgcggcttgtagacgtctagctcggtcggcatgacgttgtagtcccccgcgagcacgaccggcacttcgagttccagcagctcggccgcgtaatcttggagacgcttgaaccagcgaagcttgtagtcaaacttcgcgcttggataaggattgccgtttggaaggtataggccaccaatgacgatcccatcgacgatcgcctcgatatagcggctttgctcgtcctccggttcgcccggaagccccatccttgtgagatgaggttccagccccttggcgaggatcgcgacgccgttccacgctttttggccttgccagaccgcgccgtagccggctgcctcgattgccttgattggaaactttcccgcggcgccttcaactcctgcaggcagcagacgtccggctcggcctctcccagccatttcaggaggatctcgagccggccgtttatgccgttcacgttataggtcgcgagcttcacggctaatgtcggatttccgcttcgactttctttcgggaatttccagcgtttttcacggccttcttgaccgtttccttcgatacgccttgcttcttcgcttcgtacttgacttcgtgatcctgaccgccggcgactttcgcacggtcctgggagcggcctctcgatgtggttgtcatgacagcctcctaagtttcgacatcgagaaaacgggcatggaatcaggaagttccaccgcctaggtcgaaagtcactccccgcatgccgcggccattgtcgggcgccgggcaggcgagcccccgaggaaagcaaggcgtggtttcctgagcctcgggcccgggatacgccacagttgcgaaacgcttcggaactggcgctgagttgcgcttgtcccgagccgaggcaaaatgttgctggtcggcgcggattagaatttatccttcaaggaacgaggaaaccgaccgctgacctagcgcggaggattggtcgagcatggctcgcgtccagtggggacactaagcccaatcagacggttgcccaagcacgcgcgcgaagcgacaacagttcgaattgcacgctctccccccgaagcgattggaaaccatgcggtggcgcgaaaggcgtcgaaactggattttctaatctcatgttccgattttcgaccggtccaccggatccgggattgacacggcaaaaatcatggataatttctatccacgattgggagatgcaacatgaaactgagcgaaggcgttgaacaggccattcattgcacggcattcctggcggggttgtccgaggacggcgtgctatcggcggcggcactggccgagctccacggcatctcgacaagctatctgctcaagcacctgcaggcgctgtccggcgccggcatggtcgcgaccacacctggaccgaagggcggctattgactggccaaggcgccaaaggacatcagcctgctcgacatcgtcctcgcggtcgaggggccggcgcccgccttccggtgcgccgaaatccgccagcaggggccgaaccctctgccgcggcgctacttcaccaagccctgccagatcaacgccgcgatgctgaaggccgagaaggcctatcgcgcggaactcgccaaggtgtccgtcgcggaccttctggcggatctcggcgcggacgacgacggcggtatcgccgcgcgcggatgcgcctaccttgaactccacgaacgcaagacgggcaatcgcgcctcgtcataggagaaagcaccatgaccaagataaggaaggtcgtcgtcatcggcggcacgggcctgatcggctcgaaggcggtgaagctgctgcgggacgccggccacgaggccgtcgtcgcgagctcccgtaatggcatcaacgcctacacgggagaaggactggccgatacgctcgcgggcgccgacgccgttatcgatgtttcgaacatgatgtcgttcgacaaggacgtgataaccgacttctttggaacatcgagccgcaacctaacgagcgcggaaaaggccgccggcgtgcgccaccacgtcgtcctttccattgtaaacgccgagaagctcgcggccaatccatacatggccggcaagttggcgcaggaagagaccgtcgcggcgtccggccaagggtacaccatcgtccgggcaacgcagttccacgagttcctcgagaccctggctggcgtttatacggccgacggcgcggtgaaagttccggatatcgacttccagccgatcgcggccagcgacgtcgccgccgcactggtggaaatcgcattaggtgacccgaagaacggaacggtcgacgttgccggacctgaacgggcgccctttcgggtcctttattcaggcgtatctcgatgcgaagggcgacggcaggccggtgaccgctgacgccggggttgactacttcggagcccctgtcgccagaggctcactgcttcccggtggagagtacagtgaaggccggatcaccattgctgaatggctgaaggcttaagaggagcgcacgatcatgaagaccattctccatgctgccgcggcactcgcggcctcccttgccaccgcgtccggtcatgatatcgcaaagcccggactcgcgtacgacacgaaggacgccaaggtgacactcgtctacgagcatcccctgcccgacgttcccggcaagagcttcaagggtgtcctcgtcgagtatggaccaggaggctacagctccgcccatacgcatgcgaagtccgcgctgatctacgccacggtcctcgagggagcgatccagagcgccctgaacggtggcgagaccaagacctttaccgcgggccagaacttcaccgagctgccgggagatcgccacgacgtcagcgccaatgccagcaagaccgaaccggcgaagctgctcgccgtcttcgtcgttgataccgacgacaccgtcctgacgacgccgcgcaagccgtagagcgtcctccgaaaaacattcgctaaaccacaaatcattcgacgacggcttctccggcgatgggaaaaccgtgtccgcaagaaaggaaaaactatatgtcccgcatgaactggtccgaggtcgcccccgagggtgccaaggcgctcttcggtgttcaccactatgtcacagccaagacgaacctgccggccgaactgatccatcttgtctttctgcgcgtgtcgcagatcaacggctgcgcccactgcatcgacatgcacagccgcgatctgcgcaagacgatgtccgtcgacaagatcacactggttccggtgtggaacgaggtgcctcacctcttcaacgaccaggaacgcgccgctctcgcctgggcggaggaagtgaccaacgtgagccagacccatgcgtcggtcgaggcttatgccgctgccgctgcagctttcgaaccgaaggatctggtcgatctgacgatcaccatcgccgcgatgaacgccttcaaccgacttggtgcgccgttccgtcttccggtggcggcaaaggtttgaacaggcccggaacactcgagaagggggtagcctgccgcctccacgcaaatgtccggcaggctgcgccaactacagcggcgacgagaccatccgcgtcgccatctcccaaagacggaaagcgttctccggatcgaccgcgtatcttgccacgcccttgaacggcccggctccgcgctcgtcgacgacaggggattcctggcagtcgtcgaaatacctgccggacattccctcgaccagaggcgatcccgcaagtaacaccgacgtggccgcaccctgctctcttgttttgcgcagatgctcgggcgttctaagccccccggtgtgtttctgaagtccagtcgcaatcgctccggggttgagagcattggacgtgataccgtcgcatgcccaattccacgctatccccacggacatcagaatgcaggccgtctttgactgcccataggctaacagaggatcgtatggaatgaagcggaagtccggatcgtcgaagaacaccggcgcaaataggttgccagttgaggcgacggatacgacgcgggcgccgttcgcgctggccagatgcttccgcaggccgagtgcgagcgcgaagtggcctacgtagttcgtggcgaactgcatctcccgtccctccgccgttctccgcagttccggaatggccatcacgcccgcgttgttgacgaggacgtgcagaggctcgttccagctccttgtgaattccctcacggaagaaagatcggagaggtcgagccggcgaacgcgcagccgagcccgaggtgttgttcgcatcaactcggcgacagctctctcggcctcctccggacggcgggccgcgatcgtcacggccgcgcccgcggcgaccagggcgcggctcgtttccagaccgatgccgccagcccctccggtcacgatgatattgcggtctgcaagatccacgccttccagaacgtcggcggcggttgacgaaaacccaaacgggatggatgaagtcatggtcgtgctccttaagacattcgacttgccgggaagataagcgcgtggcattcgtgaactagatgaccaacggcacacgcaatgatgagataattcgtacagttggttcgcttccgccgggcgagctggcggcctttctcgccgtggccgaacatggcgggtttcgtgccgcgtcgaggacgctcggccagacggcgtccgcgttgagccacgcggtcgctggactagagaggcgtctcaaggtgaagctcttccacaggtccacccgaaacgtttcgctgacggagccgggccgtagacttgccgagcggctcatgccagcactcgcggagatcggtctggccgtcgaggaactgcacgaacaagctacctcgctgtcggggctcgtgcggataaactgcgacgccaacgccgccgagcaagtcctcatgccactgctgacccgcttcatgaagctccagccggagatgcgatttgaaatccggtcggagggaagaatggtcgacatcgccgagggcggattcgactgtggcgtgcgggcggctgagctcgtcccggacgagatggtcgcgatcccgatcggtccggatcagcagcacatcgtggtggcgtcgcccgcctatctcgccaaggcgccgcccatcgatagcccttcggatctcgctctacatcagtgtatccagcttcgcatggcgggtgggtcgatctatcgctgggagtttcagcgccgcggcgaggacgttgtcatggccacgagcggcaagctcatcgtcgaccactccagacttctgctggccgcggcactcgacgacggcgggctagcatatgtgacgcggtggatggcggcggacgcactcgccgacggaagccttcggcaggtacttgacgactgcaccccaccttatcctggcctttgcctgtactacccgcggcatcgccacctcggtttgggcatgcgagccttcctcgacttcctgagagccgaaggatcgagccgtcggacgccctgacgcaggcccgcgccgcgtcagttcctcgacatgcaagctgtgcgcgctctatcccgacgttcactcaggatcgcgtaccccggtacccgcgagcggtgtcgatggactatcgacggtatccggcgtaccgactggctcgacgaaccgaggggaacgccatgctcgcggtcctcgccacccaagacctcgaacacacgcccccatgttcgggagacgattacgcgcatggccggaagtggctttgccatatctcatcacctggatgtttctagagccgaccggacgaaacgaaggcttcaggccgggtatagaagaattcgccgagacgctgggcgcggccatgatgatcagctgcatgaaaatacacagtgagcggattaatgaagtgagacgataacgcccgctcgaagcggcgggcttgctaaactgagaagcctgaaccagattcattgatgaccgatagcgatgcaagatccactcttctaacgcggctgaaggaaatggagcttgaaccaggcggtccctcagcctcaaccaggtcgggccgccccaagtcggtccgggccgcagccaggacggcatcgtcaacgctctgtacccgcttaaggatgagagatcgaactgccgggcaacaggttcatattgttgaaattctgataggtgtcagggccgcggacggtggaccgggaagaggaaagagagcgtgagcttggccgcaagaagtttatgttgcggatgccggccttccgaggtcagctccgtcacgcttcgcgtgaacgcatggaagcgctcttcgtggcctacgggagggccgccgctcatcaggataggattcgatctcaaaaacacgctcccgcgcggtggacagcctactatgaagaggtttcgggggagatagaggaaagcgtcgtgagatttctgaccaccccaaaaatggcgagacttcagctagatccacggaacggggccccgttacgcacgttaaccgacaggttgcgcgatggttcatcgcagagccatcctcagcacagcggccaaaggtggggagcttccagcgaggttctccccaccgaagcttttagcgaaggcgacagatatgcagaaacagaggtttagggtcagcacttccgtgacagttgacgccgagacgccccaagcagccgcgcaacgagcattagagctgttttcgaaatctccgcctgaacggttcgacgtcttggatgagagtggatcgacattccacatcacccgtgaccatccgcaaaggtctgttgacacgatcgagaaagaggtcgttcagtatccggagttcatggagaatgacgcccctcccggtgcgggcggctaactcgatagggccgatggccttttctcggtccttgcaaggcaggacaagaacgtcgagtaaacagaactgggtccgccccgggaagtgcatcggaactaattgcgctcatccgtgttccttcccgccgagacggtctcctacagcagcttcctcggcacgtggagggcccgcgaggctctgcgctcctggctctccacacccctttctgggaacatgctttcatctactccgtttaacgtttcgaccgcgctgctggctttgccgactttgcctgttgtggttaaagggcggggaaccttccttcggttccccgccgccatgcgcggcgggataatagggacgacgcggtagttagtgcccagcgcacggagtagccttccggcttaggcgcttcatcaggctcgtcgcgagctcgcacgaagcacctttaagacttccccctccatttcagcgatgacgagccaggtctcatcagcggttacggaaatctcgtatcggtgtagggtcatcacctgcattcgcttttcactagtgaacgccaagacctaccgtttgttgctttaaatacggccgccaactcgaggaacagaacgacgtcctggatgtttaagggtatcgtcatgaagagttagacgcattacatggcgataaggtgaagagctggttcccctcaaagcgatcggctcttcgcggcttatcattccgaaacctcgccaacgcggtcgaagggtcagaaaatggctacgaacagtcgaaaccacactgcgatttacgtgggtggcttgctactcactggctttattattgctgccggggcgctcttttctggacacctgcagccaagtccagcgacccgaaccgtcatgatgcagcgatgagcaatcgaaatgggttgtcccgctatctcactgccggaacatttgtggcggcgtgaatttggccccgccgagataatctcccaacgtcttgctcggcaagtggagagccaaaaggtctcaacgctcagtggttctccacaccacatttgaaagagataatggactgatccgtctccagtccggctgtggggcgttctcgtttacgtccacccagtagctggagcggagaagcactccgttgcaaacgaacgagccggacccacgcatttttgtatgcgtcggagcgaaaatctgtttacggcgcgcacgtgtgacaacgattcttttgtgtcgtattgttatagtcgctgtctgctgggcgaaatcgtttttccgcgatgttgctgatatcggtcgcgacgtaaccgctgccctacctggtggcggatatctcatcggtgatgccgatctgtctcgcgaagaatatgagattaccgcgccgaggctgctcgagatctgcgaccgatattgccttcgcgatcacctcgttcgcgagatcgcgaaaatcggccggttctatttcaaagaaacgggtcgccccgggtgccgtccccccgtggaacgctagatggttgcaagtaagggaagatgcgtcaccaggcgcggccattgatacttgcgtgaattgcgctatcttcaacatgctattcgaaggatggttgtcacctctcttctcggtcagttttcggacagcgcacccccagggagcgaaccgatgtctggaatcagccagttttcacaaatgtccatcgaacaacgcgaattgcaccttgaaacgctagcaaaaaggctgcacttattggcgtccattgctcagcatgacggggacaagctatggaccatgctcgaggaattagccaaccagcttgacctgaatcaactagctatcgcggaggactactcaccatcctcgagcgctgtcgttgaagaggccacactgcttctcgccaaatttgaactggacattcctaacgccacgcttcattgattcttaagaacctttgctacctgtcggggtgcattggcctgttctctagatcggctaacataggttgtcgctcgagagttccaagctcgagggacaggcgaagcggattctcccaaagcacttcgccatcaactttctcgtatcccaacgagtgtagcgaatatgaccgacatcgaccacgtcgcccatggttggaccttactcgccttgcgaagacccgaaattattttgcagcgcttttgaagcgtcgccaatcgattggcgatggcctgagacccaaagctccctccaaatcttggtagagtccgtcattctgaggaggcggacagcatgaaacattcggttcacggatgagcagatcatcgggatattgaaagagcaggagaattgcccgaggacgggcgcaagcacgggatatccgaagaggctttctacaaatacaaggcgaagttcggtggcatggagatttccgatgcccgcaagctgaaggctttggaagacgagaccgccaagcttaagaagctgctggccaggcggcggccatggcgcggcgctgagttgacagggaacattctggcgcgcggggagtttcatcgacagccgcgtttataccccatgcccgcgcggctaccctctctccaattcaccccgcctcgcgcggggtttctttttagccgtcgcgcttgacgatttcgatggcgtcgtttcgctcggcgtgatcgtgcactttattgacggcgagatgatgtgggtcgggcctatcagttccgcgaagcaccagggcctgccgaccgtcgtacgttgttacatcgcagcttccgaggtgcgccgcgggaggtgctccacgaccgaatgaagaccgctgttgtcggcgagggtcaaacgcaggacattatccacagccctgccctcatcgacgtggttcgcgattatggatttcatcccaacgcgtgcaaagcctccgagccagggcaaaaggcaaggtcgagcggccttttcggcatgttcgcgaggatctcgttggtggcaacctcgacgacatgaacgcccagttctggcactagctcgacaccgtcgccaatccaagcaagcacgcgatgaccggcttacgggttcctcatccgtctttcagccagcacctttcatctctcggaggggctgccccacaaaagaggtcagagaagtggtcgacttgcactgatatccctcatggcatgcttgaccgatgacacccgatcgactagatgcgccaccgtccacttcctgggacatgcggcaaagaaagaattcggcctcgcgaggaggtcgaattcttgtcaccaataacttcgacagcgaccgcacgaataaattgttctgattgcctcgcgatacgtatgaggcgccttggcgtctcacacgatcgaccgccgaggcttgcgttcacttccatcccccgggtaacgcgtaatgggcaagcactcaccagcgggaatcccgagacgcgtttgatgggcgaaacgaaaaaaatagcaaacgagcaccagtaggcctggcttgctagcgaagggcgtggggtgggagacccgagtgtcaaggtctccaccaaaccgctcggccggtgggctcgtgacgtgcgtagcagatagtggtgacggtgaaggatgtcccggcgacgaggatcgccactatcatcagcgctttcactttagccgctttggaccgaacagacccaaggaaaaagccccgccattcatgacggggcctcgtcattaacttcaaagccgtctatcggatgtaaagctggaacaccgaccgcggataataatatccgtcactatgtcgacgatagcccttgcggtactcgcgatagcctctgtggccgttccagtagccccttcggtcgtatcggcgctcgtagcgatctcgagggtgatggtcgcgtcgccagtcacgccggtgatcgtcgcgatactggacaagttccatccccgatgtcacttgcgtgtggcgagccgagagcggggcggccgaagctaagccgaagctagatgcggccatgacaaccgcaaccaaggcagtgccgatacgcgaaatttttctatccatggttatgcctttccactggtaatgttaggaccatggaccttgcgtcatgaacggaacatgaaccattactgggcgggaccgccggatcagggcgacgtgtcatcgcgccgagccttccgatcgcgatgttggccatcaaggacgagcatcatattcgtcaaacgttctcttgcgggtccgcctattcgacgacgacacccgtcaatttcgcccggccgctaatagccgttgccgttggaatttccgggcctaacggaacatttcgacgtaccgaatgtttcgccgccgtcgagatagtcctcaacacttcccgacacgtggagggcctcgagcccctgtaactctcccggctctccacacccctcgccttcaatttatccgcggcgacactccggtgatcgcaaaccccgcgatgaaaatggccgacatgttgatgaggcgcatcgccgatgattttggaactcactcgccgctgacaattcgcggtcagggaattggagcgggtagccggcgcttcaccgtttgatgaaattcggggaccagcggcatggtgcgtttcattggctccaaaatccacgctttaatagcgaaagccatcgggtattcgaaaagtccttgaagcggagtgagacagtgctaggatcaatccgtccgctgctccgggcagcacccctgaccccgcttgaagcggggttctttttttcaaagcacgaggatctcccgccgcgtcgccaccgcgggcggtggtcattcgcgaaattgaattgagagcgagcgctcaagcgatcggcgggcaagaccgccaagttcaatcaggagcggctcggatggaattgattttgatgcccatgagctatcaacgtggctctcctcgggtgtcagcttgagcttgcggttcattgtgatggaggcggtcctgacgccaccttgttgtctttcggatagtctgagaaccggaatcgtaaaggctcctcatttatattggtagcgatcgcttaaacaagtgacgtgcggccagcttcgttgctatcgcccctggtcgcggcgggtgtaccctcatcttgcttgtcccgcccgagggcgtcttggaaatcaagtggtcggtgagcagatttccccttgagcgtggaacaacgtgaccgagccgttgttatgccgctgtcaatcacgcaaaatcctgaggaggaaacacaatgcgtatgaagatgatcgccgcggcaatcctcgtggctggcatgtcaacggcggctttcgctcagtccaacccagcgccggctggatcgacgatggacaagaaccaaggtgataccggtggcggcgccaacactgacatgaagaaaccaaaagcagtcgataagacgtccactggaagcacaatgaagatggacaaaacgaagtgcgccaatccggcgagcagcgctggaaccggcaaacttcaaacccagggtggcaagagcaacgccacgccagaagacgaagcttgcgcggcccacaataactgagccgccgccggcgaaaaagccgtcatcgtaaagatggcggctttccaattcgcgcttcagccgtttccacagttagccaccgcgaaaaggatgacgaactccgtacttgggacttcttgtgcgacccatccatgatgccgcgttaaaatctctcgcgcatccggccataggcatcgcgtaaatcgtccaacgttttgtcgtaccgccaacgtttcggcaaggacttcgcgccagcgaccgtgaaagcgacggtgcccacgatggcggcgatcgcgatcagtgttgagagagggtgaagcttgaccgtcgcttccgtctggcgggcaacttggcgagcgccgctcttcattgtgccagcgagattgaaaacctgttcatgcaacgcttccacctgccgccggagttgtccaatctcgtctttagcgtcgaaacctggctcaatcggaaccccaacttcggccgtgctcgtgtcgactatgccgcgaggtacgggttcaccaatcttagccgcgtggtcggtaagggttcggtgttctttcttgattggcatgatgttgctccctgcgaacggttggccggcgcttccaatgacggattacgtcgctgggctcgcttttgttccattcgctctgcgcgcatgggacgtgcatggtgccttcgagcggagagtggcgaagtgatgggttggtggaaggcccacgtgtagcaatcgcttggcgagcagttttcggcgatcggattagtgagaagttcgaaggtagctgttggagaggctgctgcgagatatggtgccttggcctgatcgagctggcgcggcgggtaagacggacgatcacgcttgatgatcgatacttcgtccagcttttgccaggggcggccacagggctgcttccccttggctaacggccgcggcggtgccgttgtcgccgctttccctggctcatgccggaatagcgattaacgggagcgtgtcttcggcatcttgctctacctactgtcgcattgtcgctacagacattcgcctcgaaataccttaggtttagcgcagtgtttagtaggggaagcgtctcgttcttgcctagggcaccacggctttcgcggcggatttggttgagcagcctgtcgcaaccgccccagccttcacttggagcggtccttatttcggtatcgacggcggtgccggttggttgaacggtggtttctccgccggcgggctatcggattcagaagactttaacggcggcatgttcggcgggttcgtcggctacaactggcagctcgacaacagcatcgtcttgggcgtcgagggcaatgttgaatacaactggaacgacaaggacttcctgggcgccattgtcgggagcgattggtctggcgccgtgcgtgcccgtgttggctatgcatttgataatgcgctgatttatggcgccgctgggtggaccgcgacgcgtggattcgtggacgttcctggctttgacaaggaaacgaagacattcaacggttacaccgtcggcgcgggtttggactacgcgttcacgaacaacgtctttggccgcgtggagtatcggtacaatgactacggcagcaaggatctgcttggtttcgatgtcgatgccgatcagcatgtggtcaagataggcctcggcgtgaagttctaaaactcccatggcgacataaagccccgcttccgcggggctttatgttcgcggctcgtaaattcaagggtgccgtcgtggtggcgccagtctttctttccgatgacgcgacatcgccttgtcatgcgccggtcgcggggctccctcccagcatccaccaatttgttgggaaccaatgcggattggcttggaacttcacgggtcaccaagcatggtgagcgcgttctcgatcgccgctcccgaggccgtgttgtcgaacacgcaccagccgtccgacgccaccatgcccgagaatgacctaatctcgttcgctgtatagttggaatagtaggtttttggcttgccgtgcaggcgcaagtatctcggcgccccttcgaattcccccgcctcccagaccagggcgggatcggcgaaaacccgatcaaccgcataggccttcaatagctccagtgcctcggccgcggcccaactcttgtgcctggcctcgatgacgatcggcccgtcacagcaatcccggattgcctggaacgcgctatcaagaacaccagcatcaaacggcagcgatggcggcagttggcaaaggagcggcccgcgtttttccccgagcggcgcgatatcctcaagaaaggtcctgaacggcttggcgacgtctttcatcgcgtgggtgtgggtgatcgtcttgggcatcttgaccgcgaacctgaagcgggccggaacggcggcggcccatcgcgcgaaggtcgatttcctgtgcctgcgatggaaggttgagttgatctcgacaccgttgaagaccgaggcatatcgagtgagattgcttccttccgtttcgaagctgccagcgacatttttgggaatggaccagcccgctgtggcgatgatcggcaaatcgtgctcctctctagctcgcaatcaccagactgaaacgacgaggatgatttcaaggttccgcaatccacccaggtccctggccctaaagcgaggaacgtctaggaaaaattgattccgagatcagcgtgagctgatcccgtggcaagcagctcttcccaacacggggaaggaaacgggatatcgcgtcagcgtcggctaaccgacgtcgcgaggtttgggtagtggatgagctatcccgcgcgcgacgttaacgctgcaatgtcgtccgcgtgggcgcagcttgaaatcgacgcgcgctccagccatgaccgcgacgacctttggatcataccaccgtcatggaaatggccggctgctgggacaggaggtccgcgaggactgtcatgctccgtcgcaattcctcgatggtggcgggcgcgcctaggccaagccgaatggcctctggagcgtccaccaccgcgaacgcgtcactggccacgacgccaatcccaaccgaacgcaatctcgagaccagttcacccctgttccagggctccggcacgtttagccagacatggaaaccttgaggggaagtctcggcaaaggtggataacgtttcaggcaagacgcgcagcctcgcggcggtttcccgcatgatttccttgcgcgcggtgtccgccaggccggtctctatccatctagaagccgttgcgctcgtgagaggcgagaccagggaggcggatgcgcggatggcgttggtgaccctatgggctcgcccctcaggtaccgcgatgtatgcaacgcgcaaggcgggagacaggcatttggacaggctcgcgacgtggtagacgctgtccggcgcgagcacggcgagcggtgttggcgcgtcgggagccaggaaaccgtaggcatcatcctcgataatcggaacatcgtttactcgcgccaactcgaccagctctcggcggcgcgccaggggcatcgtgcgtgtggtcgggttgtgcagggtcggcatgcaatacaatgccttcggcttcattgccttgcatgctctcgcgaacgcttccgggataagtccatgattgtccatctccaacggagcgagcttgagcctaaggtgtgacgcgacggcgcggaaacctggatacgtcaaatgctccacgcaaaccgtgtcacccggttccacgagaacactcagaaccgcatggagagctccttgagcgcccgccgtgacgaggacgcgatcacgagtgacatcaggcagcctgcgcgagagccaggaggcagcggtggctcgatcgtcgatgatgcctccgggctcttggtagcgcatcagcaaatcgagtccacgatcccgtaggtcgccaaccgcctcccacatacgctgctcgatggagctgttggcgaaacgaggtggcaggttcatggtcatgtcgaccagacccgaaggttcggcgcgcgatgcaaggctccggcctaccgtgacataggttccctgaccaacccgtccttcgatcaagccgcggccgcgagcttccgcgtatgcccgactaaccgtcgtgaagtcgatggcgaggtcatcggcgagcttgcgttgcgttggaagacgatcgcctcgcgcgagacgtccactggcgatgtcagccgcgagcgcgtcggcgatggcgaggtaaatcggtcccccgctgttgtctagccgcggtgcccatgtcgtttttgccatcggttccatcgtgatccaatcaattccgtaatatatggatctaagatggaaagccttgtcaagcgaactaccggggacgcacgttcgggcacccgcctttcgccaattttagggcgagctcgcgggattttcgttttgatcggccgaacatcgccccccgttcaacgagctgcgacaatttggataatatgcgattttgattggataatgtatgtaagcagcatcccatcaataagtggaaatccagccatgagttatgaacggtcgccgatatcgccgatgagcgagcgggcatcctcccagccatgggatcatttggcgctgtgtgtttactgcttcatcggcctggccgcggcggcgctggcgttgcgtatccaggtcgtttacgcgccgtccccgtggacccaccttctcgtcgccctaccccctgtatttgtcgcatgcatcctgcccttgcgactgctgaaggtctggctttcacgcgccaaggaagcgcgggaacgcgccacccctgaccgcgacgatgacccaacggtcgccgcgatagggccgttcgtcgttacacgaaagcccagctgcaagttttcggcgtccgcggatgaagccaggacgcgcgagcgcaaggagtcttgatcatggagtggatacccatagcccttggaaccttcaaggcgctcgcgctgggcgtggcaatgtattatgcaatcaaatggcattacgaccagggcgagaaaggcgggacgcgggctctgctgcgcatgggcggaaaggttgctggcgcattcctattgacgctcctgaccgtggtgctcttcgcgttcgtcttgagcaacatgctcggtctggatctgagttatccctgagcgcgtggcggacaggcgttgtctggcggaaaatgtcgaagccgccgtgcctgcttgatcccgccaggcgggcgagccctggtacccgatttagggtttgcatctggcaaatatggttccgccatcggatgtcacgtttgtcccacgttcggcctcggaactttttggcctggatccgcgtcaaaccaaacgagggcttccacttaaggaatacctgtctcgagtgcacccggacgaccgaccccggttggcgcaagtaatcatcgatgcaattatcgcggacatcccgcaacaagacactaccgcgtccagggggacgacggagatttccgcttgtttgccgcttacggcaaggcccttcgtggcccggaaggtgtcgcggtgctgtactcggggattgttgtccccgctcaggcaacgagtgctcatttcctgaactaggttcgttggttaccacgccaaagccacctgccctaggacggatcaagtcggaaaaccgaggaaccaggtctgctagcgccggggcgagcgcggcatgacgggtcccgcgtgaacggatcctcgaaacagatcgtatcgcagcttccggtcgcggcgtcggggttaacccgcgcgagacccgatggcgcacgcacgcccaggcgttcgttgtctcttgtcactatgaggagcatcaaggagcgcctaatcgccctgaccgagccgcgcggtcactgcgtcctcgcggaatcgccaggccatcccgaagacgtccgtaagcggttctcatcgccacgaccgccgtctgatcgtcccgaggcttcattccgagacggggttgccgaacaggtcggttggaacagcctttgcgcggatggtcgaggacggttcgtcgatccttccgccgaacgaccgagcgctgccctttcgcccggaccataacacgaactggattttctctcccgccttgatgtcgcggtgcgccacgaaataaccccggtggtcaggtgcgtcctcgtgtccggctttttcattttcaaacaggcaaacgtcgccgctgcgtggtttaaatggcatggtgctcctttttttgtctcgcggcatgagcgtcagggcaatcctctcggacgctgcgaaccaatctgggtcgcgatgcctcacccgtgccgatgatcttttctggtttaggcaattcccggacgtggcggccctgcctccataagtggcgatcgaacatggcaccggcaagaccgagaaggaccgccatgcggccatgcccatcggctagcgaatggggcgtcaaaaatctcacatgaccttccc

SEQ ID NO: 46 - DNA, 20271 bp, Rhizobium matallidurans
  source 1..20271: mol_type = genomic DNA
tgatggcgaagggacgacagtgcgcttcgaagaaagcgcgcgcctcgcttgccgatatcggccgtgcgtcgcgcgctgatcgcagcaattcgagaagatcggcgctggtcaggcccagcgatccggtgcggtagggtttggtctcttcaatatggtggcggcaggcttccatagcctcgaaaaggctggaggggtcgtcatccctccagccttccaggtcgtcaaagcctatcgcctcgagggcaaagcctcgttcatcatcactcatgttccgattcggtggccacgagtttccagttcggatcgcgcgagcgggtgtcgcgggcgaatgtccagaggtcgctgatttcggcaaccgtctccgcgtcaccgtcgacaaggacgtcggccttgtcataggtcgcggaaatcatctggctgatgatgcgcaaggtgatctgcgcttcgctgccattgacctcgacattcttgatttcggccttgtcgataccgacaaaggtcgacttgaccttctcgcccttgctttcgcgatccgcgatcgccgcgtcgaagccctcgtagacttccttcgacagcaaattcttcagcgtcttgcgatcgccatcggcaaaggccatcacgatcatttcataggccatgcgggcgccgttgacgaactccttcgggctgaaggagggatcggccttgttcatttcccgcaacgattcattgagcggcgtgccggctggcgcgaaggcatcgatcgccgcgaaacggtcttcttcctcgccggctgcatcgcgccgcggcagcgttactacctttccggcatcctgcgcctcgggaccggcggcatcgcgcggcgtatagagatcgcgcggcggcttctcattgcccgtgcgtcgaccaaggacgttgcgaagctgcaaaaatatcagcaccgccgccacgagaaaaaacaaagtgatgaagtcgtttgaacccatatcccgccgcaatctgttaacatctggaatttctatacccatatagtctgcatatacagatgattcaaatgggtccggtacgttggaccgatttcaatggagccggtgagagccggatagacataatgcgcctcacaatgctgcctggttttctgttgctgatgccgttggccgagatcgcgggcttcgtgattgtcggcaaggcgatcggtctttgggcaacgctcggacttgtcatgctgagtttcgtggccggcatgatgctgttgcgacggcagggtatcggcatcctgaaacgcatgtccatggagggacgcaccggcgcgatgcctgggcgcgagctgctgcggccagcgatgttcgtcatcgccgcgctgctcctgatcatcccgggcttcatcagcgatatcgtcgcgctgctcatcttcatcccagcggtgcgggatcttgcgtggaactacgtgagccgccgtttcgtggtagtcggcgcgtccggcggcccgtcccggacatcgccgaaatccccctatcgcgataacaacgccaatgtcgtcgatctcgatgcggaggattatcagcgcgacccgaacggcaagtcgccgtggtccggcaaaagccttggcgaatgaggctcttgccggagcctttcctgattaccgccggctggcctagggttgtaacgacatcgtcgaaatgatagatgcggcgaaatccaatgccctcgaggaaaagccaatggacagcgaaaacagcaataacggcgcaacgagcccgagcctcaccatcctagcacagtacaccaaggatctttccttcgagaatcctggtgcaccgcgttcgctgcaggcccgcgacaaggcaccggccatcaacatcaatgtcaacgtcaacgccaacccgctttccgacaccgacttcgacgtcgttctctccttgaacgccgaagccaaggaaggcgacaagacggtattccacacggagctcgtctatggtggcgtcttccggatcgccggcttcccgcaggaacacatgctgccggttctcttcatcgagtgcccgcgcatgctcttcccgttcgcgcgccagatcatcgccgacgtaacccgcaacggcggcttcccgccgctgatgatcgacccgatcgatttctcgcagatgtttgcccagcgtgttgccgaagagcaggcccgcgccaaggtgcaggcaaactaattcctgatcaaatgacgaccgagatgcccgggccagcgcccgggcattttagtttgggcgatcgtatttagcccagatgcctttttgcccgagcttggcaatcagcgcatcatgctgctcggcttcggtttcgctcaggcgcggtgctagcggtcgcggccgctccagcgcgaccagaacaatatcatcatcgctgtcgttgcgttccgaggcgccgttgttctgcgtcacaccgagaccaagtgctgtctggcgaccaccgatcatctcgatatagacttcggcgagcagttcggagtcgagcaaggcgccgtgcttggcgcgatgcgagttgtctatcccatagcggcggcagagcgcatcgagcgagttcggccccatcggatgcttgcgccgggccatcgacagcgtatcgatcacattctcgggagagatcggcggcagggaaagccgcgccagctcggcattgatgaagcccatgtcgaaggtggcgttgtgggcgatccacttgccttcgccgaagaaatcgagtatctcctgcgccaccgccgcgaagggctgcttgtccttcaggaactcgtcggtgatcccgtgaacggcgagcgcgtccggatggaccttctggtctcccggactgatatagatgtgcagcgtctttcccgtcggaaagtgattgaagagttcgatgccaccgatttcgatgatgcgatcggtgcggttgtcgagcccggtggtttccgtatcgaaaatgatttcacgcattcgggaaatctccgttcgctatccgctgtctcaggtccgcgataatggcgccgacccgctccctggcctggtcgatgccatgaccggtatcgatcacataatccgcgcgccggcgcttttccgcatcgggtgtctggcgcgagagaatcatattgaatttctcttccgtcatgttcggacgcgcaagtacccgctgccgctgaatctgtggatcacagctgacgacgacgacgacatcgacccgatccgcggcgccgctctcgaaaagcagcggtatgtcgagaaggaccatgggtgtgccctgcccgcgttgttcgtcgagaaacatcgcttcgcgttcgcggacaagaggatgaacgatccgctccagttgcttgaaaccttcgggacgcgatgcaagctgccggcccagttcctgacgatcgaccgtgccattcttcaccgatccgggaaaggcgacatcgatgagcggcgcggcggcgcccgaatacaggtcatggacgacggcgtcggcatcgttgaccggcagaccggcatcggcaaagagcttcgccgtcgtcgacttgcccatcccgatcgagccggtcagtccgattttcagcatcaatgcttttccatatcagcgatgatcatggcacgaagtgtcccgtcgacgaccggccgctttccgaaccatttctcgaagccgggtaccgcctggtgcagcagcatacccaaaccatcgacggtcgcgaaaccctgttcctcagcctgcgcaagaatgggcgtcttcagcggtacatagacaatatccgtgacaacggcgtccggctgcaacggcgagaagtcgatatcgggcgcgatctctccctccatgccgagcgacgtcgtgttgataaagagaccagcgcctttcatcacttcggaaagagccgccatcggatgcggatgcaccgcttctccaaaacgatccgcgagttcgacggcgcgggcgaccgtgcgattgacgaggtggatctctctgatgccgcgatcgcgaacggcctggatgacggcacggctggcgccgcccgcaccgaggatgaccgccgagcgcaccttgtcccatccgggatggcgctcatccagatttgcggtgaagccgcggccatcggtgttcgtggccttcagcttgccatcctcgagccagagcgtgttggacgcgccgagttcctgtgaaaggtcgtccggctcatcggccaatttgaacgccatctccttgtgcgggatcgtgacgttgccgccgacgaagtccgatgcgcctgatttcaaggattggatgaaagccggaaaatcacccggggcgacttcatgggcgcgatagcttccatcgagagacagcgacttcagccaatagccgtgtatgatcggcgagcgcgaatgcttgacgggaaagccggtgacgaaggcgcgcgggccgattgtttcacgtgaatcatccatcgatcgcacccagctctctcaatttttccagaagcggcagcatcggcagccccaatatggtgaagtagtcgccatcgattttagagaacagctgcaggccctccccttcaagctgataggcgccgacgctgctcagggcgcgatcgccgacccggttcagatgccgtgcgatgaaatcgtccgtgagcggacgcatcgtcaattcggcacgcgagacatgctcccagatgatatcgccattataggcaagcgcgaccgcgctgttcagcctgtgggtctgcgcggacagcgctgcgagatgaccggctgcgtcttccatactcttcggcttatgaaatgtgcgctgccccagcgacatcgtctgatcggaaccgatcacgatcgcgcccggcgagcgatcgcttacctctttggctttcgccttggccaggaccagcgcgatcgcatcgggcgttgcgccatcccgttcgagtggtgcttcgattgcccgctcgtcgaccttcgctggatgagcctcgaaggacaagccggcattttccatcagcatgcgacggaaggggctggaggaagcgagtatgagtttcggtatcatctgtgctctcggcgcggttggcttggcagcgcttagcgcagcttgggacgcagggcaacgattgcggccgccgtctcttcgatggaacggcgggtgacgtcgatcagcggccagttgtggcgggcgcaaagcgagcgggcatatttcagttcttccgatatggcggctcggtcggtgtagtcgccgcgatcgaagcccggggtcgcgccgaggtcgcgattttcgcgaacctgcgagatgcggtcggtggtggcgatcaggcagacaatgagcggcttgctcgcttcgaacagactttctggcaggggcacgccatagacaatcgggatgttggctgtcttgatgccgcgattggcgagatagatgctggtcggtgtcttcgatgtgcggctgatgccgatgatgacaacgtcggcgtcattataatcatccggcatctggccgtcgtcgtgatccatcgtgaagttcagcgcttcgatgcgcgcgaagtatccggcgttcatgacatgctgcgcgccgacccgacggcgcgacggcgcgccgagatagatctgaaacgcgttgagcacgggttccagaacattgacggaggccacgcccatttcgcggcaacgctcgtctatcaacgtggcgagttcgcgatcgacaatcgtatagagcacgatgccgggctccccgtcgatcgcttgcagcaccgtcagcaactgctttcgattgcggatcagcggatagacatgctcgatcggctgcgacgacttgaattgcgccgaggccgcgcgtccggctgaaatcagggtttcacccgtcgagtcagaaatgagatgcagatggaagaagttggtacggttctccacgctattttccgctgcctgttgaaaacactggatgacggagagctacgagacgcgccgggggttaggcaagggagaacatgcctggttttccacatttcggattctttgcgggctcgaaaagagtgcctgttggttttgtggaaagtttgcggctgtgcctcggatagtcacagcttgtccacagcctgacggatttccatgggtgtcatatctctttgaaatcatgatcgattttatacctgtcctgtttttgacaccgaattgcgcgatttctttcccggatcattcccggggcagtgacaattggtatcgggcgtggatggattttaatccttgatagtcaccgactctaagaaatagaaaccttataaatatctttgattttttatagggaagaagcgcttgagtgacatgcgccggaagatcatgcgggttctggacggggatactttgagccctcccccgatctggctgatgcggcaggcaggcagatacctgccggagtatcgagaggttagagccaaggccggaagctttctcgatctctgttatacgccggatcatgccgtcgaggtgacgctgcagccgatccggcgctatggctttgatgctgccattctcttctccgacattctcgtcattcccgatgcgatgaagcgcaatgtgcgtttcaccgagggtcatgggccggagatggatccgatcgacgtggacgggatcgaaggtctggatggcagccgcgtgctgcggcatctggaaccggtgctggagaccgttcgacgtctccggagtgatctgccaacggaaaccacgctcctcggcttctgtggcgctccctggaccgttgcgacctatatgaccgctggccatggtacccccgatcaagcccctgcccgtttgtttgcctatcggcatccgaaggcattcgaaaagctgctgatgttgctggcggatgtttcggctgactatctcgtcgcgcagatcgatgccggcgccgacgcggtgcagattttcgattcctgggcgggcgtgctcggcgagcgtgagttcgaggcgtttgccgttaagccggtggcgcgaatgatcgcctccatcaagacgcgccgcccgaatgctaagatcatcgcttttgccaaaggcgccggctatctgctgaagacctatcgccagaagacgaaggccgatgcgatcggccttgattggtccgtaccgctcgacttcgcggccgagctgcagaaggatggaccggtccagggaaacctcgatccgatgcggatggttgccggcggcaccgcgcttgaggaaggtatcgacgatattctgcagagactgggaaatgggccgctgatcttcaacctcggacatggaattaccccgcaggccgatccggacaatgtgcggctgcttgtcgagcgtgtgcgcggcggaagggtgtgacgatggaacgccagatcgacgagagacccggttcctatgcgcgccggcgcgccttcatcgccatcgcgttcttcgtggcgctggcggtcggcctcttcgtctggaatcccgatacgctctatctctggatcaaggcgcttcacatcatcgcggtgatctcatggatggccggcctgttctacatgccgcgactgttcatctaccacaccgatgccgagccgggttcggtgcagtcggaaacgttcaaggtcatggaacggcgcctcttgaaggtgatcatgaacccggcgatgatgctgacctggatcttcgggctgtatctttcgtggtcggcttatgacttccagggcggatggctgcacgcaaagatcgggcttgtcgttctcttgaccgccgtgcacgtgttcttcagtcgcgccgccaaggcgttcgagcgtgacgagaaccggcgttcggcccgctattggcgtttcatgaacgaggcgccgaccgttttgatgatcgcgatcgtcatcctcgtcgtcgtcaagccattttgatgcagccggctcacaggttaaatttgcttcattttaagcagcccccttgcggcggcggacctgactcgctattttccgctcacctcatccttgtggcatgtatgtaaagttcgatcgtctgcgggttcctcgcagggccggttactgtctcgacatcgcctttcccctcaaaattatagagtaatggacacttcatgtctgaaatgaagcttcaggaacttaagagtaaatccccgaccgatcttctggcattcgccgaatcgctcgaggtcgagaatgccagcacgatgcgcaagcaggagctgatgttcgcaatactcaaggttcttgccagccaggacgtcgagatcatcggcgagggtgtcgtcgaagttctgcaggacggcttcggctttctgcgttcggccaacgccaactatctccccggtcccgacgatatctacatctccccctcgcagatccgccgcttctcgctgaagacgggcgatacggtcgaagggcccatccgcggaccgaaggaaggcgagcgctatttcgcgctgctgaaggtcaatacgatcaacttcgacgatccggaaaaaatccgtcacaaggttcacttcgacaacctgaccccgctctatccgaacgagcgcttcaagatggaactcgagatcccgaccaacaaggatctctcctcgcgcgtcatcgatctcgtcgcgccgctcggcaagggccagcgtggtctcatcgtcgcgccgccgcgcacgggtaagacggttctcctgcagaatatcgcgcactcgatcaccgccaaccatccggaatgctacctcatcgtcctcctgatcgacgaacgtcccgaggaagtgacggacatgcagcgctcggtgaagggcgaagtcgtttcgtcgaccttcgacgaacccgctacacgccacgtgcaggttgccgaaatggtcatcgagaaggcgaagcgcctggtcgagcatggtcgtgacgtcgtgatccttctcgattcgatcacccgcctcggtcgcgcctacaacacggttgttccttcttccggcaaggttctcaccggcggtgtcgacgcaaacgcgctgcagcgcccgaagcgcttcttcggcgcggcacgtaacatcgaagaaggcggctcgctgacgatcatcgcaaccgcgctgatcgataccggcagccgtatggacgaagtcatcttcgaagaattcaagggtaccggcaactccgaaatcgtgctcgaccgcaaggtcgccgacaagcgcatcttcccgtcgatggatatcctcaagtctgggacgcgtaaggaagacctgcttgttccacgccaggacctgcagaagatcttcgttctccgccgtatcctcgccccgatgggcacgaccgatgcaatcgagttcctcatcgacaagctgaagcagacgaagagcaattccgatttcttcgaatcgatgaatacctgatttatccttagccggattctatcaattaaagccggcctctaaattggccggcttttctgtttgcacgtgcctgactgaatagccaacgctgtttccaaagtggcgcgtgatcgattcggtatcgtatcaattggagtgtgttcgtggcggaattcacagagacgatctatgcgctatccagtggcgccgtgcctgccggcctggccgtcatccgtgtcagcggaccgaaggtcgcggatgtgatgaagggcatggtttcaagcgccgttccgccgcgctcgacctcactgagaacgattcgaacccgtaacggtgcggtcttggataacggtctggtcttgttcttccccggccctcactctttcaccggcgaagacgtcgtcgagtttcatctgcatggcggccgcgcggtcgtaagcgcggtatatcaggagctcagttcgttcgacggtctgcgccaggcaatggccggcgaattctcgcggcgcgctttcgaaaatggaaaggtcgacctgcttgaaatagaaggtcttgcggatttgatctccgccgagacggagatgcagcgccgccttgccctcgaatacagctctggtggactctcgacgctctatgaatcctggtcgcagcgtttgacgcggggtcgcgcgctcattgaagcggaactggatttccctgacgaagacgatgttccgggctcggtgtctgatcaggtttggtcggatatgacggcgctcgtcagcgaagtacgtcagcatctcggcctggcaaaggccggggagataatcagagacggcttcaaggttgtcatcgccggcttgccgaatgcgggaaagtcgagcttgatgaacgcgctcgttcgccgagatatcgcgatcgtgactgatattgccggaacgacgcgcgatgtattatccaccgatctcgatatcgatggctttctggtgaagctctacgataccgcgggcttgcgggagaccgaagaggttgttgagcgcgagggcattcgtcgggcgcgcacggcaatggaagccgccgatctcgtgatctacattgaagacctgtctgccccgacggatgacagcgccacgccctcttccgcgctccgtgttggtacgaaatcggatttgccggccatttcttcgcgtgagtacgatgtcaggatctcggtcgagaccggcgcgggcttggacgagcttcggcaggcgatcggaagtcggctccgggaaatggcacctgctcattcgctggcgatccccacccgtgcccgccacaacgattcattagcggaatgtattttggccatcgagcgggcgatcgtgaatgaccatgttgatctagatctgagagcggaagatctgcgaatggccggtacggcgcttggtcgcatcaccggccgggttgatgtcgagaatctgctcgacgtgatcttcggcgaattctgtatcggcaaatgattcacgtgaaacagtgcgaccccgtcgaaaaacggggtttcacgtgaaacgtcttgactcccggggcagcttgccgcatcaccaaccgatctcaggagcattgttatgaatacctcacggttcgatgtcatcgtcattggtggcgggcacgcgggatgcgaagccgcttccgcgtccgcgcgcgctggggcaaggacggcgcttgttacgcataagcgcgagacgatcggcgtgatgtcttgcaatcctgcgatcggagggcttggcaaaggccatctggttcgcgagatcgacgctttggacgggctgatgggccgcgtcgccgacgccggcggcattcagttccgtatgctcaaccgcaaaaagggcccggccgtccgcggcccacgtacccaggccgaccgaaagctttatcgccaggcgatgctgaccgagatctcggagatccccaatctgacaatcatcgagggtgatgcattcgatctggcgatcaaggatggacgggtgtctggcgtcatcatgaaagatagccggattctggatgcaggcgctgtggtgttgaccaccggcacgtttctgcgtgggctcattcacattggcgatcagaaaatccctgccggccgcgttggcgaagagccgtcggtgggtctgtcgaagacgttgctgggtatgggattgcaactcggccgtctgaagacgggcacccctgcccgtctggacggaaagacgatcgactgggcgggcgtcggtcgccagggtgccgatgacgatgctgtgccgttctccttgatgaccgatcgcatctcgaacccacagatcgactgcggcgttacgcgcacgacggaagcgacacatcggatcatcgtcgacaatctcaagcgatcggcaatgtattcaggccagatagaaggtgtgggtccccgctattgtccgtcgatcgaggataagctggtcaagtttggcgagcgcgatggccatcaggtgtttctcgagcctgagggtctcgatgacgatacggtctatccgaacggtatatcgacttcgcttcccgctgacgtccaagatgcatttattcgaacgatacctggccttgagcgggtcgtcattcttcagccgggctatgcaatcgagtacgaccatgtcgatccgcgtgaactcaagccgtcgctcgaagtgaagaagcagcccgggttgttcctggcagggcagatcaatggcacgacgggatatgaagaggctgccgcgcaggggttggtcgccggcctcaatgctgcacgtctggcgggacagcaggacgcggtgcggttcagccgcacggattcctatattggtgtgatgatcgatgatctcacgtcgcgcggcgtggcggagccttaccggatgtttacgtcgagagcggaataccgcctgtcgctccgggccgacaacgcggatgtgcggcttaccccgctcgcgatgtccttgggtatcgcgtcccgctctcgttccgagcggtttgatcggtatgcatcggctatcgaagcggggcgcgcgttgttgatgtctctgtcggtgacgcccaccgaggcgcgccgatccgggctcaaactcaatcttgatggccagcggcgcacggcgtatgagctgctggcgttcccagatttcgatctggagacgcttcggccggtatggccggagttgaatgcgattgatgctgaagccggcgctgccctgcagatcgaggcaaactacgcggtttacatggatcgacagcaggctgacgttgctcacatcaagcgcgacgaggagcgtgtcatccctgaggacttcgactttgatcgtttggctggcctgtcgaacgagctcaagcagaaattggcgaagacccgtccctatgatgtcgcgcaggcttcccgtattgacggaatgacgccggcagcgatctcgctcctgctggtgcacttgcgccgcggcgacgtcgcggcatagattgcaatccacactatttgagagtcctcgtatggaattgaacggccgacgtgtttcacgtgaaacacaggaacgacttgagcattttgttgatctttttcagaaatggagcaaggccatcaacctctcggcgccctccacgctcaaggacgcgtgggatagacacgtcgctgatagcgcacaaatctttcagcttcagccgctggcagcgaactgggtcgatttcggtagcggcggcggctttccgggcgtcgtgacggcgattttcctagctgaactcaacggtggctgggtgcatctcgtcgagagcaacaacaagaaagcagcattcctgcgcaccgcgctcagggaaacgggagcccgtggttccgtgcatccagtgcggatcgaagatgcggttgccgacctgccggcttgcgacttcgtctcggcccgtgcccttgcagacctcgacaagctgttggaattcgttcagccattcgcgatccgtaacgaaaaaatccgcgcctacttccacaaaggccgggattaccgatcagaggtcgcgaaagcgcatggtcggtggacgtttgatctggtagaacacggaagtgctgtcgaggttgactcagtcgttcttgagatctcccatttaaggcatttggtctaacaaatcgggcgttgcgacaatggttgctggacggaatcgaattatcacgatcgcaaatcagaaaggtggcgttggcaaaacgacgacggctatcaatctggcaacagctttggcggcgattggtgagcgggttcttatcgtggatctcgatcctcagggcaacgcaagtaccggcctgggtatcgatcgcaagagccgcagccggtcctcctacgatcttctgatcggtgatcacggaattcttgaggtggtgcaggagactgccgtgccgaacctctacatcgtcccgtcgacgatggatctgttggggatcgagatggagatcgctcagcagagtgaccgtgtcttcaagctcaaaaatgcgcttgcagagcgcgacgcatttcagttttcctatatccttgtcgactgccccccgtcgttcaatctcctgaccatgaacgctatggccgccgcgcattcggtgctggttcccctgcagtgcgagttcttcgcgctcgaggggttgagccagttgctcgaaaccgtcgaccaggtccgtcgaagcgtgaatccgcagcttgatatccagggcatcgtgctgacgatgttcgattcgagaaacaatctggcgcagcaggttgtgaacgatgtgcgcacccatctcggggaaaaggtttatcatacgttaattccgcgcaacgtgcgcgtgtccgaggcgccctcttatgggaagcctgccattctctacgacctcaaatgtgctggaagtcaggcctatctgcagttggcttccgaagtcattcagcgcgaacgccagcgtctggctgcctgagcaaagctctcgaatatagtggtgagtaccgacgatgaacgatgatgtctcgaagagaagactggggcgcggcctcgcagcgctgattggcgaaatggatcagccggcgcccgtcgacgcgagccaacgtgcggtcagcgccgaccgcctggttccgatcgagttcattacgcggaacccccgaaaccctcgccgtttcttcgatgatggtgagcttcatgatctcgcgagctcgatccggcagcatggcattgtccagccagtcgtcgtgcgcacgctttcggtcagccaatatgaaatcatagccggcgaaagacgttggcgcgcggcacagctggcaggtctggtcgagattccggtgatcgtgcgggatgtcgatgacaagacggcgctcgaaatcgcgatcgtcgaaaacgtacagcggtccgatctgaatgcgctggaagaggcgcttggctacgagcagttgatcgcggattacggctacacgcaaaacgatcttggcgagatcatcggcaaaagccgcagccatgtcgccaactcgctacggcttttgaagttgccggaacctgtccgagatctgctcgcggccggtagcctttccgcgggccacgcgcgcgctctggtgtccacgtctgatcctaccgtcctggcgcgaacgatcgtttccaagggcatgtcggtgcgcgatgccgaacggctcgcacagaacgatatcaaggcgcaatcggagccgaagcctgccgtcaatccgcgcgatcagaaggattccgacacgatcgcgcttgagcgcacgctctccgatacgcttggattggacgtcgtgatcaatcacaaggccaatggcggacagattagaatttcctataagtcattggatcaattggaagaaatctgcaggcttctggagcgtcggtgatcctggctatttacggccggattgaagcgtggtcgatagaagcgtctgcatggcaatcgtgtcctccagcgaggcgcgacgcctggtctgcagaatggctgcctgcaagcggtttgtttcacgggctagcgcgtcggccgaccacgttctcaaggcctgctcaatgatcggcttgcgcttgaaatgaaggtggcgcccgagcgtctgcatgacctgagacgcctgtgtccgcttttcgtccatctcggcgcgcatcgcatccatcaattgaaactgccgcaggcatgcctgtatgacgagaaagaccgacgtcttcgatgccgtgatcttctgcatggcatgcaagaagtttcccgagtttcctgtcaggatcgcatcgacggcgtcgtcaacggagatggcgcttgcgtcaccgatgatgtcagtgacgtgatgctcctcgatgacctccatattgaggcagtatagcgcgagcttcctgacctcgtttcgcgaggcgatgcggtcgccccctatgagctccagcagcgcctgtcgcgcggcgggcgtgatcctgaggttggcgcccgcaagttcggcgtctatcaggctgttgagcgcgcgggcgtcgtcggcatagcatgggatggtcgcaatgctgcgggccgcctcgcttgcctttcgcagaagcgagcccttcttgaggtcgccggcctctatgatgatgaatgttgcttcgggtggcttctgggccagcacttgcaggccgtcgacgagatacttctcgttcgccgcgccgcggatccagatcagcttctggccgccaaagagcccgatcgcgcctgcttcgtcgagcagtcgtccctggtctttctgcaggtcgccgatatcaagcttgatgagggaaaacggatctgacagatcaacgccggttctggcggcgatcaggctggcgcgttccgacaccagcccgcgatcagggccgtaaatgacgaacagttgatagtggcgggcggatttctccagaaatccctcgaactcatgcgattttatctccgccacgcaaccgctccttagcggccaagcgccgctgcgagctcggcggccacgaattcagccacctggcgcgcggcacggtcttcagcgtcgcgaatggcgcgctgcttggcaaactcctgagcggggaagtcgacaagggcggttgccgactgatggccggcgcggatcacgtggccgtccttgttcgacttcagcgtatagtcgacgctgacggtcgcacgacctgcacgtgattcatccgaggaggcgaccagcaacgtgtcaatgacgctcgagcgcgcgttcatttcgaccttgtagtccgccttgtccggttcgccggcgccgcgcgcggcaaggaagatcaagcggttgcgcacttcctgctcgacacgcgacgtcgcctcggagaaggcgatggatgacagcttgccggcaacgcctgatgtctcggaatagagcggccggacctggcacgaggtgagaagaaccgtggttgccagcaccgcggcaatccccacgcggcgcgccagcttggaagcaatattaaacgacaatgttcacaatcctttgcggaaccacgatgattttcttcggcgcctggccgttgaggacgcgcttgacatcctccaacgcaagtgctgcgtcgctgacggcattttgatctgcgtcgcgtgagattgtcaattcggcgcgcttcttgccgttgatctgcaccggcagaacgacctcgttctcgacgacaagggcgtcgtcgtatttcggccaggcggtctgcgacagaagcgtgtcgtgaccgagaacggaccagcactcttccgccaggtgcggtgtcatgggtgctacgagctgcaccaggatttcggtcgcatcgcgcacggcggcgcgataagcggcatcggcttttcccgcggcaacggtggtcagagggccggcaatggcgttcacgagctcatagatgcgcgcgacggccttgttgaaccagagcttgtcatagtcgttctggacggccttcagcgtcttatgcgccagctgggaaatggcgaatgcatcgccatccttagccggagtcgcagtcacgtcgttcaacgcttcagcagcttccgagatcagacgccacaggcgctgcgtgaagcggtgggcgccctccacgcccgcttccgaccagatgacatcgcgctcgggcggagaatccgacaggacgaagaagcgagcggtatcggcgccgtaagaggcaatgatgtcgtcgggatcgacgacgttcttcttcgacttcgacatcttctcgatcgagccgatggcaatctcttcgttgttggacagaagaaacgcgcggcgcttcccgtccagctcctcgatcttgatgtcggcgggcgcaacccattcgcgggtcatgccggagccacggctgtaggtctcgtgcaccaccatgccctgcgtgaacaggcccttgaacggctccttcacatcgacatgaccggtttcgcgcatggcgcgggtgaaaaagcgcgagtagagcagatgcaggatcgcatgctcgatgccgccgatatactgatcgacaggcagccagcggttggcggccgcgaaatccgtcggcttgctctcccaaggcgccgtgaagcgggtgaagtaccagctggaatcgacgaaggtgtccatcgtgtcggtttcgcgacgggcatccttgccacaatgcgggcaggcgacgtgacgccaggtggggtgccggtcgagcgggtttccgggctgatcgaaggtgacgtcctccggcagcttgaccgggagatccttcttcggcaccggcacaacgccgcaatcctggcagtggatgaccgggatggggcagccccagtagcgctggcgggagatgccccagtcgcgcaggcggaagttgaccttgcgttcgcccagcggcgcgttgcccaacgatgctgacgacagacggtcggcgacgatgttgaaggcctcgtccgtcgacttgccgtcgaggaagcgcgagttgatcatgatgccatcgccgtcataggcggtatcgccgacggcgaaggccgtcgcgtcaccgtcacggggcatgacaacagggataacaggaaggccgtatttgcgggcgaaatcgaggtcgcgctgatcgcctgccgggcagccgaagatggcgcccgtgccgtaatccatcagcacgaaattggcgatgtaaacaggcagttcccaggaggggtccagcgggtggcggacacggatgccggtgtcgataccctttttctcggcggtctcgagcgctgccagagacgtaccggcgcggcgcacgtcctcgcagaaggcttcaatgtcggcgttcttcgccgcggcgtccttggccagagggtgatcggcggagatggcaaggaaggatgcgccaaacagcgtgtccgggcgggtggtgtagaccgttacctcggtctcgcccgcaggcgcggtttctccgacgatttcccagcggatcgtcatgccctcggaacggccgatccagttcttctgcatcaggcggaccttctcgggccactgatcgagaccatccagcgcgtccagcaaatcctggctgaagtcggtgatcttgaagaaccactgggtcagctcgcgctgctcgacaagcgcgccggagcgccagccgcgaccgtcgatgacctgttcattggcgagaacggtgttgtcgaccgggtcccagttgaccttggactgcttgcggtagacgagacccttttccaggaagtccacgaacatatgctgctgatgctggtagtattcgacatcgcaggtcgcgaactcgcggctccagtcgagcgacaggcccatggccttcagctgcgccttcatcgatgcaatgttctggtaggtccaggccgcgggatgaacgttgcgctccatggcggcgttttcagccggcatgccgaaggcgtcccaacccatgggatgcagcacgttgtagccgcgggcgcgcttgtagcgcgcgacgacgtcgcccatcgcatagttgcggacgtggcccatatggatgcggccggacggatacgggaacatctccagcacgtagtatttctcgcgcggatcagcgttgtcggtctcgaagaccttcgcttcgttccattttttctgccagcgaggctcggcatcgcgcggattataacgttcggtggccatggtattcgtatttccggaaaatcaagggaagttggtggtgaccttcaccatgaaaccaccgtagcgtcaagtttcgcagacgctgtttgccgccaatcggcgccgctcggcgataatttcgaggcttcggaccttggcaagccaagatcgggtgtttagtgcattttcattgttttcgatgattgaccgaggcgcaacatggaacttcaagagcgactggaagaggtgcgcggccggatcgccgcggtggcccgcgagacgggcagagcggaaggctcggtgcagctcgtggccgtgtccaagacattcgacgtggatcagatccgcccggccattcaggccggccagcgcgtgttcggagagaaccgcgtgcaggaaagccagggcaagtggccggagctgaagagcgagacagcaggtatcgagcttcacctgatcggaccgctgcagtccaacaaggccggcgaagcggtcgcgctcttcgatgtcatcgagacagtcgaccgcgagaagatcgcgcgcgctcttgccgacgaaatgaagcgccagggcaaggcccctcgcctctttgtgcaggtcaacacgggcctcgagccgcagaaggcgggcatcgcgcccgacgatacagcggcgttcgtggcactctgccgcgacgagcttcaccttccgatcgacgggttgatgtgtattccgccggcggatgaaaacccgggcccgcatttcgccttgctagcgaaactggcgaaggcctgcggcgtcgacaagctctcgatgggaatgtccggcgattacgagacggccgtcgcttttggcgccaccagcgtccgggtcgggtcggccatctttggcgcccgctgatatttcgcttcggtcatggcgctatcgtcatgaccattgttgcccgctggaatgtttcacgggaaacgtttttgacaaggcgacagcgcaattgccaatcggcaacaaaaaaccccgccgaagcggggtt

SEQ ID NO: 47 - DNA, 19876 bp, Rhizobium matallidurans
  source 1..19876: mol_type = genomic DNA
gtttatgggtgtgatacccccctctgccctgccgggcatctcccccacaggtggggagattggctgggggcggccgctcgttccacgctcaatttttgcgaaagcctcgccacttgccgatctccccccttgtgggggagatgcccggcagggcagaggggggtgtgccacacccgcaaggccagcaaatcctgcgagccccgcaaacccaccaaaccccgcattcccagtcatgccgccttcatccgctcgaccgccatcaacacccgttccggcgtcgccggcgcgtccagcctggggcagaccttgtagtccgcaacgctcgccaccgccatcgacagcgcttccagcaccgagatcgccagcatgaagggtggttcgccgacggccttggagcggccgatggtgtgttcggcgttttcggaccattcggccagcttgacgttgaagatcttcgggcgatccgaagccagcgggatcttgtaggtggagggggcgtgggtgcgcaggcgccccttggcgtcccaccagagctcttccgtcgtcagccagcccatgccctgcacgaaggcgccctcgacctggccgatgtcgatcgcagggttcagcgagcggccgacatcgtggaggatgtcggtgcggtcgatcagatattcgccggtcagcgtgtcgatcgagacctcggtgcaggaagcgccataggagtagtaatagaagggcgtgccctttccggcggcgcggtcccagtggatcttcggtgtcttgtagaagccggcggccgacagctggacgcgggcgaaataggcctgccttatgaaatcggggaaggggatttcctggttgccgacgcgcacccggttcggcaggaaggcgatctcggagaccgggacgtcccatttctcggcggcgaaggcgacgaggcgttccttgatctggcgggcggcgtcataggcggccatgccgttgagatcggtgccggaggaggcggccgtggcggatgtgttgggcaccttgcccgtggtcgtcgcggtgatcttcacatgctcgatatcgacctggaagctgtcggccagaacctgcgccaccttcgtataaaggccctggcccatctcggtgccgccgtggttcaggtggatcgagccgtcctggtagacatggacgagggcgccggcctggttgaaggcggtcagcgtgaaggaaatgccgaacttcaccggcgtcagcgcgatgccctttttgatataacggctgtcgcggttgaattcgatgatctctcggcgtcgcgcttggtagtcggcgctctcctcgagctcgccgacgatccgctccagaatgctgtcctcgacctcctggtgatacggcgtcagcgtgcggccggagccgggctttccgtagaaattcagttttctgatatcaagcgggtccttgccgacggcataggcgatttcctcgatgaaacgctcggcccccagcatgccctgcggtccgccgaagccgcgaaaggcggtgttggagacggtgtgggtcttgagcggcttcgaggtcaggtgcacgtgcggatagaaatagctcgagtcggcatgaaacagcgcgcggtcggtgaccgggcccgacaggtccgacgagaagccgcagcgggcggcataggtggcgtcgaccgcgtggatgcggccttcctcgtcgaagccgacttcgtaatcgaccatgaagtcgtggcgtttgccagtggccgccatgtcctcgtcgcgatcgggccggaacttgattgatcgtttcagcttcttggcggcgatggcggccagcgccgcgaactggttgccctgcgtttccttgccgccgaagccgccgcccatgcggcgcacgttcaccgtcacggcgttggaggggatgttgagcacatggccgacgatgtgctggatttcgctcggatgctgggtcgaggaccacacggcgacctcgtcgtcctcgccggggatggccatggcgatctggccttcgaggtagaaatgctcctggccgccgatccgcatctggcccttcagccggcgggcggcgtttgccatctcgctcttcgcctcgccgcgactcagtgtcatcgggctggtgaccagcgcgccgccgttttccagtgcgccgtcgatgtcgctccagtgggcgaggtcgcgatattcgatcttcgccttgcgagcggcgcgccgagcgatgtcgcgggtctcggcgatcaccgcgaagatcggctgctggtggaattcgacttttgtttcggccagcagcggttcgtcgtggctgccgttggagctgacgtcgttgatcccaggtacgtccttgccggtgaagacccagacgacacccggcgtggcggcgacctcggaaaggtccatgccgacgatctcggcatgcgcccggtccgacaggccgagcgcgccgtggagcaggccggatggttccagaaggtcgtcgatgtagtcggccgtgccggtgacgtgcttgtgggcgctgtcgtggcggcgcgaggcgtgcatcgggcctgatatgacgaaggtggggtcggggaaggcagacttgtccatcaggggttgcctcctgtggtgggtgttgatgtgggggtgggggttgacgttgtgccgagtggccccctcatccgcctgccggcaccttctccccgttggggagaagagactcggagccggccgctcgctccatcttcccttcgccccataggggagaaggtggcccgaagggtcggatgagggggctccacggcacaacggtacatatcataccccatcacgccacctcctcgaaccgccgcagctccgcaggcgcacccgtcgtctccagataaaaccgcgtcagcaagttcttcgctgtcagctgccgatactccgacgtggcgcgccaatccgaaagcggctggaagtcggtgtcgaaggcatctcttaccgcctcgatcgtctcctcattccacggccggccgatcagttcgttttcgacggcgcgggcgcgcttgggcgtaccggccatgccgccgaaggctatcctcacgtcgttgacgtcgccttgctcatccagcgtcagatagaaggcgccgagcacggcggtgatgtcctcgtcgcggcgcttggtgatcttgtagacggcaaaatgcgtgtcctcggccgggtagggcacgaagaggctctcgacaaactcgccggggcggcggtcctgcttgccgtagtcgatgaaataatcctccagccgcagcatgcgcgtgccctccgtcgagcgcagcttgacggtggcgccgagcgcgatcagcggtggcgggctgtcgccgatcggcgagccgttggcgatgttgccgccgatcgtgcccatgttgcgcacctgctcgccgccgatgcgggtgatcagccgcccaagcgtcgggaccttgccggcgatggtctcgaaggcgcgggtataggtcacgccggcgccgatggtgatgccgccttcacctgacgtaattgtctgcaattcctggagatggttgatgaagaccaccgggttcagcgtccgcatctgcttggtcacccaaagcccgacatcggtcgagccggcgacgatggtcgccttcggctcgtcggccagaatgcgcgccagcgcttccagcgagcccggcaccaacagacggtcctcgcccgaggtgatcgagattgtgcccgatccctgcatcgcccacaatcttgcgacgatgtcggagcgggtgcgctccagcgggtcgaacagcgcgctcgggcgcgtcctcgccacctgctcggcggccttgacgatcggctcgtagccggtgcagcgacagagattgccctgcagcgccttctcgatctcggcgcgatcgggattgctgtttgcgagccacaaaccgtacatcgacatgacgaagccgggggtgcagaagccgcattgcgagccgtgacagtcgaccatcgcctgctgcaccggatgcagcgtgccgtccttcgccgccagatgctcgacggtgacgacatgggtggcgttcagcgagccgatgaagcggatgcaggcattgacggattcatagtgcaacttgccgtcgatcagccgcccgaccagaaccgtgcaggcgccgcagtcgccctcggcgcatccttccttcgtgcccgtcagccggcgcttcagccgcaggaaatcgagaagcgtctcggtaggcttgacgtccttcagcgcgacgtcttcgccgttcaggataaagcggatgctgtcgttcatgtcgttcccggtttttctctttattttaaatggttatgccgccgtccagcccccgtcaatcgagatgtgggtgcccgtcacctggcgggcctcgtggctggcgagataaagcgccaaagcgccgatctcctcggccttgacgaattcatgcgtcggttgcgccttcaggatcacctcggtcttgacctgttcctcggtcatcccgcgggctttcgccgtgtccgggatctgcttttccaccagcggggtcagcacgtatcccgggcaaatggcgttgacggtgacgcccgtttcggcaagctcgagcgccgccgtcttcgtcaggccgagtataccatgctttgccgcgacataggcggatttgaacggcgaggcgacaagcgcatgcgccgaggcgatgttgatgatgcgcccgtgcttcttctccttcatcagcgggatcgccgcgcgcatcgtgtgaaacgcgctggagaggttgatggcgatgatctgatcccacttgtcgatggggaaatcctcgatcttctcgacatgctggacgccggcattgttgaccagtacgtcgatggtgccgaacgtccccgatgcggtggcgatgagatcggcgatctcctgaggcttggtcatatcggccggatggtggatgacgccggctttcgagagtgattcaagccgcgccactatctccttgatttcctccggctttccgaagccgttgaggacgatgttgtcacccttgccggcgaatgcggtggcgatcgcgaggccgatgccgctggtggatccggtgacgacgactgttctggtcatgaagttctccgatttgccctgcgacgcagtgaacggagcctagtccggaatcggttgggctggcaattgggtgcggatgtcgcggtgcggcattgtggccgggagagctattcccgtcctgcggatgggacgtgcccggaatgcaacggcgatggcatcctgcggccagcaacacccacaaccaaccgcccaaacaaatttcactttaatttcttttcacattcgtttgcctacattattcattccattcgaagcggttcatgggaggatgacaatggcggggtatgttctggcgatcgatcaggggacgacgtcgacgcggacgatcgtgttcgatggcgagatgaggatcgccggggcgggccagaaggaattcacgcagatctatccgcaatctggctgggtcgaacacgatccggaggagatctggggttccgtcgtctcgaccatcaagatggcgatccgcgaggcgaagatcagcgccaaggacatcgcggccatcgggatcaccaaccagcgcgagacagtcgtcgtctgggagcgcgagagcggcaagccgatccacaatgccatcgtctggcaggaccggcgcaccgccagctattgcgacaagctgaagaagcaggatctggaaaagaccttcacgaagaagaccgggctgctgctcgatccctatttctccggcaccaagctttcctggatgctggccaatgtgaagggagcgagggcgcgcgcggccaagggtgagctctgcttcggcacgatcgacacgttcctgatctggcgtctcaccggcggcaagagcttcgtgaccgacgccaccaatgcgtcgcggacgctgatgtacaacatcgccgagaacgaatgggacaaggatctcttggagatcctgcgcgttccctcggccatgctgccggaggtcaaggattgcgcggccgatttcggcgtcaccgagccggacatcttcggcgccgcgatcccgatcctgggcgtggccggcgaccagcatgcggcgacgatcgggcaggcctgcttcgagccgggcatgatgaaatccacctacggcaccggctgcttcgccgtgctcaataccggcgccgacatggtgcgctcgaaaaaccggcttttgacgaccatcgcctaccggctggacggcgagacgacctatgcgcttgaaggttcgatcttcatcgcgggtgcggccgtgcagtggctgcgcgacgggctagggatcatcgacagcgcgtcgaagaccggcgaactcgccgatgccgccgatccctcgcaggaggtctatctggtccccgccttcaccgggctcggcgcgccgcactgggacgcgaacgcccgcggcgcgatcttcggcctgacccgcaacagcggcccgaaggaattcgcgcgcgcggcgctcgaggccgtctgctaccagtcgcgcgacctgctcgatgccatgcacaaggactggaagggcggcgtcgacgagacggtgctgcgcgtcgacggcggcatggtggcctccgactggacgatgcagcggctggccgacattctcgacgcgcccgtcgaccgccccgtgatcctcgagaccacagcactgggcgccgcctggctcgccggcagccgtgccggcgtctggcccgacaaggcggccttcgccaaaaactggaagcgcaacaaccgcttcgagcctgccatggacgaaaagacccgggcggcgaagctgaagggttggcggagcgcggtgaagcggacgttgagcgaggggtgagggccagagaagctggcagctatggctatggccacgacttttactaaggtcggcacgcgttggcgctgaacagcaattcagcagccgacgacttgaacatagcctgtttccgctatctgatccaatgttccgtctcgcgtgacaatcgggactttcttgtatctggcagttgccatgatgtagcaatctccggggtctttgtgaccggtcttcgcaatcatgttggcagcttcaagggcgatcgttggacctatcggcaccagtttggacgaggtcgcgtcgagcgcggctttgaaccattcttttacgctgaagttgccgatatcgggggcattcgttttcttgttgaccgcaatcgccaactcccatgccgtgatcggcgaaacgaaaagcttacccacttcttgagcgccagctatcgctaccaatgcgtcctcatgaagtgtttccggctgtgtgaccaaccacaataaagcgtgcgtgtcgaggaccgctccagccaactagctggccttcggcttgtctttaagcacttgttttgcaatcggtttggtcaggtcgaggccaggcttgattgacagctcgcttcccttgagcgcaccggcacccttcacggtcacgaactgtcctgttcgcgagttgcgaaccgtcacgcttgttggtgatgcttttacctgagccatggagataacatgacttcaaaccatgcttagttcaagcgaagcattcagaaacaatctccgacagcacgccacagttcaacctactcatgtctcccacagcccagtaattttttgctgcgtcctgtcggtagccgcgttactccttcgtcattgaggaagaggagtacgagatgctgtatgcgatcctttgctatgccgatgaagagcgggttttctcctggaccaaggaggaagaggacgccgttatggcgaagctttatgcggttcaggcgcccttggccgaaagcggcaagctcggaccggtcggccggctgatgccgacgacggcggcgaccaccgtgcgcaagggcaaggaggagccgctggtgctcgatggtccgttcgccgagaccaaggaggcactgctcggtttctacgtggtcgacttcgacacgctggaggaggccgttgccttttccaaggagctttcgtcggtcaatcccggctccacatcctatgaaatcaggccgttctacgtgtttcggccgggagagagcgcgacatgacagacattgcctggatcgacgtgacgctcgcttccgcccggcctaaggcgctcggcgcgctgcttcgatacttccgcgatctcgatatcgcggaagaggcctttcaggaggcctgcctgcgcgctgtcagaacctggccggacaaggggccgccgcgcgatccgacggcatggttgatcttcgtcggccgcaacagcggcatcgatgcggtgcgcaagcgttcgaagacccaggcgctgcccgatgaggagctgatctccgacaccgaggatgccgagagcgatatcgccgagcggctggatacgtccaactatcgcgacgacatcctgcgcctgctcttcatctgctgccatcccgacctgccggcgacgcagcagatcgcgctggcgctgaggatcgtctccggtctctcggtgcagcagatcgcccgggccttcctggtcggcgagagcgccatggagcagcggatcacgcgggccaaggcgcgtgtcgccaaggccggcgttcccttcgagacgccggatgcggcggagcgggctgagcggctgtcgatcgtctcgacgatgatctatctcgtcttcaacgagggctacagccaggcggatcccagggcggaagcctgctccttttccgacgaggcgatccggctggcgcggcttttgctgcgcatcttccccggcgagccggagctgatggggctattggcgctgatgctcttgcagatctcacgtcgtccggcgcgcttcagcgccgacaacgagatcgtgctgctcgaggatcaggatcggtcgctctggaaccgcgagttgatcaacgaagcgctggctttgctcgacaaggcgatccgccaccggaagcccgggagctaccagttccaggcggcgatcgcggcgctgcattcgcgcgccaagcgggctgacgataccgactgggaggagatcgagctgctctaccgcgcgctggagcgcatgcagccgtcgcccgtcatcacgctcaaccgggcggtggccgtctcgaagctcaggggcgccggcgaggcgctggcgctggtggaaacgcttcaggagaagctcgacggctatttctattatcacggcctgcgcggcgggctgttgaagcagatcggccgcccgcgcgaggcgcgcgaggccttcgatagggctatcgcgctggcgcattcggcacccgaggcggcgcatatccgccggcagatcgacagcctgacgatggaaccggcgttgccggcggtgaaataattccgcgaaaagccttgcgccgcgtcggatcggcgacatctcacacgtcctcgtaacagaccgatcaggatgtaacggactgatcaagaacggctttcattcaaacggagacgaccgatgaccgagaccgccacgcacgagcttattctcgtccgcgaattcgacgcgccgcgcgaaaagatcttcaaggcctggaccgatcccgagctgatgaaggaatggttcgtgccgcgtccctggacgatatcggacgccaagctcgacgtgcgcgccggcggcgccagcctgatcgtcatgcgcagtcccgaggggcaggattttcccaatcgcggcgtctatctcgaggtgatcgaaaacgagaagctggtcttcaccgacgcctataccagcgcctgggtgccatccgaaaagccgttcatgacggcgaccgtgctgctcgaggatctcggcaacggccgcacgaaatacacggcaaccgccgtgcactggaccgccgaggacaagaagacccacgaggaaatgggtttccacgagggctggggcaaatgcgccgaccagctcgccgagcttctggcgcgcatgtgatttggagattgcctcaccctcatcccggccttgtgccgggatccagcgcgatcaagtccttgatcgcagaagactctcttcgccgcgcggacgcgcgtcggctggattcctgtcacaaggacaggaatgagggaggtcctctgttcatgccgcgtatgaggtggttcgcaggatgattccgttcaggctttgaagtgcttgaaatgagagtcggatttggcgatgggggcgggacgggtatcggcggcgatctcggcttgcgcgctacgaaagcccaaccgacggcgacggcaatgcgaaccatagtcctccgggatcggcctctccagccccggcttccagccactcgcgcacaatcgaattggcgatttccaggtcagactcgccgtaatgtgtttgtagaatccagtcgaacctcgttcccccgccgcctttcacaggcttggcacctgaggcaagcagcgcgagcacacattgtctcacgaattcactaagcgccgcatcgtccagctgaaagccttcccgtccggctggaactatttgccataaaccgacggcatcgacctcgagttcgcctgacaccgtttcgatatgttcggcaatcgtatggccatagatcttatgacgggtgtccagcttcattggtgatgtatctcgatcctgagcggagattgggatcgccgcttctacgacgccagccgtcggtccgcctagctcccccatcaactttatcgaacgatccgttctagaatttgtcattgcgccccacctcggccatccttatctgcaatctaaagatttcaacgggatgcacgccatggaactcggcctttataccttcgcagacgtcaaccccaatccgtcgaggagcaagggggtggaaggggccgagcggttgaagcatctgatcgaggagatcgagctggccgatcaggtggggctcgatgtcttcgggctgggcgagcatcaccggccggattacgcggcgtccgcgccggccgtggcgctggcggcggcggcggtgaagacgaagagcatccggctgacgagcgccgtcacagtgctttcctccgacgatccggtgcgggtgttccagcagttctcgacgctcgatcttctttccaacggacgcgccgagatcatggcggggcgggggtcgttcatcgaatccttcccgctgttcggctataatctcgaggattacgaccagctgttcgaggaaaagctcgaccttttgctggcgcttcgcgacagcgaggcggtgacgtggtcgggcgagatgcggcccgcgatcaacgggcgcggcgtttatccgaggccgtttcaggacccgctgccggtgtggatcgcggtcggcggcacgccgcagtcggtggcgcgcgccggtgcgctcgggctgccggtggcgcttgccatcatcggcggcgaaccgcatcgcttcgcgccgctgtttgacctctaccgcgaggccgcacggcgggcggggcaggaccaggccaagctcaagacatcgatcaacgtccacggcttcgtcgccgacaccacggatgcggcggccgatcagttctacgggccgcaggcggaagtgatgaaccggatcggccgcgagcgcggctgggggccgaccagcaggccgcatttcgatgcctcgcgcggaccgaagggggcgctcttcgtcggcgatcccgaggtggtggcggagaagatcatcgcgcatcacaagctgttcaagaacgaccgcttcctgttgcagatggcgatcgggctgatgccgcacgaccagatcatgcgcgggatcgagctctacggcacgaaagtcgcgccgatcgtcagaaaggcattgactgagagcggcgaaggggcgaaagccagcgcctaaagcaggagcttcatggcgtaaaggatgaattggatttcccccggcgtcgtgttctgttccagattcgagagccggccgaccggccgtaaacgcagggccggaaacggaatttcatgattatcgagactgaagacgaactgctgaagctcaaggagatcggccgcatctgcgccaacgcgatccagatcatgtcggcctcgctggagcctgggatcaccacgcaggagctcgacgatatcggccgccgggtgctcgaaaatgcgggcgcgcgctcggcgccggagttctgctaccagtttccgggcgccacctgcatcagcgtcaacgaggagatcgcgcacggcattcccggttcgcgcgtcatccgccctggtgatctcgtcaatatcgacgtttcggccgagaaggacggcttcttctccgataccggcgcttccttcgttgtgccgccgtcgaaatcgaagttggacaagctctgccgcgacggcaagcgggcgctgtgggtggggctcaaccaggtgaaatcgggcgagccgctggccaagatcggccaggcgatcggtgcattcgcggccaagaaccgctatacgctggtggcgaacctcgccagccacggcgtcggccgctcgctgcacgaggagccgggcgagctttcgacatggccggacccgtccgaaaagcggatcatgaccgacgggctggtctttaccgtcgagcccttcctgtcgctcggcgccacatgggccgagggcggcgacgacgcctggacgctctatgccgatccgcaggcaccgacggtgcaatacgaacacaccgtggtcgcgacccgcaacgggccgatgatcctgacgctggccgacggccagacgtaaggccttcgcgatctgtcttacgatataacggacccataatgcgaaacgccccgccgcaagagcagggcgttttcgtttggcttgatgacgccggtcgtgattagtcgttcctgggctgctgcaggatctcggcggcggcgcgctcgagaatgccggcgatgcgcttggcttcgtccttcgaccatggatagcgcagcttcagcgccgacttcaaaagcatgcgggcggcgacaacttcgctcttgtcctcggggaaggcttcttcctcgcgttctcctccacggctttccggacctcggctttccggatcgaagatgcggcggacatgcgccatcttctcgccgatgcgttccagctttccaagcgtcatgtcgatcatggaactgttctcctcgacctgtttgcggccgctttcggtgatgcggtagagcttcttcgtgccctccgcctcgacctcggcgaggccggtttcctcaagataggtcagcgccggatagatgacgccggggctcgggacatagaagccgccggagcgttcttccagaagcttgatcagctcgtagccgtggcgcggctgttcggccaagagcgccaggatcaccagctgcaggtcgccggccgcaaacttccgccccatgcgaaagccgccgccgcccatcattccacctctaaaacctctcatcgatcactccttatgatgtatcgttgattatgtcgtaaaacatatatcgtaagatatgtcgtttcaagggcgggccgaaaatttccggaattgatgggttcatcagaaaatcttgattgcggctcgcattgtgcggcgcgataagcgaagcatgttggctcgcaatgaacttccccacgcatccccgcatgcacctttgtttcgcacggcgctggccgggatgatcgccatggcggccgccatgggcttcgggcgcttctcctatacgccgatcctgcccggcatgatgagcggcgtgccgctgtcggcggccgatgccggcttcatcgcgtcggccaattttgtcggctatctcgtcggcgcggtcgcggccgcctatggctgggcggcggggcgggagcgcaaggtggcgctttcagcgcttgccgccaacgccatcctcttggccgcgatggcgatgaccggttcggtcatgctcttcgccgtcatccgctttctcgccggtgtcgccagcgcgttcgcgatgatcttcacctcctccatcgtgctcagccacggggcggcggccggcaacgaccatgtgcaatcggcgcatttcggcgggccgggggcggggatcgcgctgtcgtcggtgatggtcttcgtcatcggtcttgcctcgcaaggcggtccggacgcctggcggatcgactggatcggcggagcgatctattcggcgatcagcctcgcgctcgtctggctgcttctgcccgcggggccggtcgccggcgggcaggccggcaaggagccgccgatcacatggagccggccgatgctgctcgtgacactctcctacgggctgttcggcttcggctatgtcatcaccgccaccttcctcgtcaccatcgcccggatggcggcggccggcacgaccgtcgaattcctctgctggttcatcgccgggctgacatctgccgtggcgctgttcgcgtggaagccgctggtgcggccgctcgggctcggctgggtctatgtcgccgcacttctggtgcaggttgccggcgtgctggcaaccgtgatgctgccgcgctcggtggcgcccctgatcggcggggcgctgttcggctcgaccttcctggcgatcaccgcctacgggctgcagatcggccgcaagctggtaccggcgagcccccgccgggccttcgcgatgatgacggccgccttcggcttcggccagatcgtcggcccgatcgtcgccggcgcgcttgccgagcgcaccgggagcttcgtcgcgccgacctacgtggcggcggcggccatcgtcgtctgcgccgccatggtcatgccagtcgtcaagaagctctcctaagcggttacaattgcgtaacaatgccgtcaggccattgctcctatgttcgaactgccttaatttccggcgcaatcgctcttatagagcttgcgaagacactcgttcaggaaagcaatccctcccgtgtttctatcctacttcccgaagccgaaactcttcttcacgtcggccgtcgcctgggcgctcgtcggcgtcctcctctggtatttcggaggctcgagcctcggcgccctgatcgggctgccgccactggcgccggggcaggaggcgccggtcggtgtttccgtgttctggtcgacgccgttcctgtggttctacgtctactacatcgtcttcgtcgccatcttcgccggcttctggttcacctacagtccgcatcgctggcagatgtggtctgtgctcggctcggcgctgatcatcttcaacacctatttctcggtgcaggtcagcgtagccatcaatgcctggtatggcccgttctacgacatgatccagcgtgcgctggcgcgccaggagccgatccccacggccgccgatctctattggggcatgacgggttttgccggtatcgcctttgtggcgatcaccgtcggcgtgctcaacctgttcttcgtcagccactggatcttccgctggcgcacggcgatgaacgaattctacatgtcctactggccgaagctgcgccacatcgagggcgcctcgcagcgtgtgcaggaagataccatgcgcttctcgaccacggtcgagagcctcggcgtcaacctcgtcagctcgatcatgacgctgatcgccttcctgccggtgctgttcaagttctccaccacggtcacggaattgccgatcatcggtacggtgccgcatgcgctcgtctgggcggcgattttctggtcgctgttcggaacggtgttcctggctgccgttggcatcaagctgccggggctggagttccgcaatcagcgcgtcgaggcggcctatcgcaaggaactggtctacggcgaggaccatgacgaccgcgccgatccgatcaccgtggcgcaactcttcgccaatgtgcgccgcaactacttccgcctctatttccactacatgtacttcaacgtcgcccgcatcttctatctgcaggccgacaacctgttcggcaccttcgttctcgtgccctcgatcgtcgccggcaagttgacgctcggtgtgatgagccagatccagaacgtcttcggccaggtacgggaatccttccagtatctcgtcaattcctggacgacgatcgtcgagctgctctccatctacaagcgccttcgcaccttcgaatccgccatcgacggcgagccgcttcccgcgatcgaccagcgctacctggatcgcgaggcggccggggtcgtgcacgccgacggctagtggggcgggattgggttttggagacgccgcgtgtccttggatgcgcggcgttttttgtttgtggggtgggggtgcttgtgcggtgggcccactgtttgccttgtgcccggggtacccccctctgtcctgccggacatctcccccacaaggggggagatcggctcgtggtgaggttttcgccaaacaattgacgtggagcgagtggccgcgcccagccaatctccccccttgtgggggagatgcccggcagggcagaggggggtattccgggtgcgaagccaaccgtcacccactcaccacccacgccaaaaccgcgcgcgaagcaaagcctcgcgacggtcggcgtcatgaaacgggaagggcaggcggtttgttgtcggtggtatggatgtcaggctgcccgcctgcccgatcacctcggtttccggttcgcccgacccgacaggagcgtctctcggatcggtcttgccggtggatcatcggccctgacggcgtctaatccccttggcaatcatcaccccacgccggatttcgagtggctgagcatccggttcgcgacccggctcccagtgcggtgacgaggaggagtatggcgtggcggcgcggggcggggatgagaaatgtgcggtgctttcgatagggtgttgagcgggttgagggatttgtttcgtggggtgggtgatcgtgcccgtggggtcgggtggtggtatggggccgagccacgtgtctcaaatacctggcctgccggcatctcccccacaagcggggagaacgttgggggtggccgctcgcgccacgtttgctgtctgggcgagttatgaccgcaagtcttctcccccttgtgggggagatgcccggcagggcagagagggtgttacacggtaaagcgctcaccaatccggccgagccccgccactcacaaccccgaagccggcgtcgtcttcagcttgccgcgcgccttgatcaggggaatcgcttccgaatagctgacgcagtcgacgtcgtctcgccggcagacgtcgcttaccaggcggtcgagggcccgccagtaggcgccgccgttcatctcgacgaagtggaagccgagctgcagcgggatgcggtcgcccgcatattgcttgtcgaaggcgcgcttgaaggcggcgtaggcgcggtcctcgaactgcttgctttcggccttgtcctcctcgcccttggaatggcggacgaagaggttgtagtccatgccgatgatcggccggtcgcgcgggccctcggggatcagcggcagcccgaagcggatgatgccgccttcctcgaccggcatggtcggtcccttggtgacgaggctggcgtcgtaggtgaagccggacttcttctcggcggcgatcatgtcggcgccttccgtggtcgaaagatagggggcgcggaaacccctgatgcgattgtcgaccaggtcccgccagccctgcggctcttgcaggccgacgcccttccaggcgttcctcagcgtgtcgcggaagtcggtgtattcctgcgaccagttggcctcgctccacttgcggccgtcgaaatggccgcagccgtggctggagatctcgttgccctcgaggctggcgttccagatgttgtcaaggcgctggcggatttcgtcgtcgctctgggcaaagccgacattggagcggccggccttctggtacggcgcctggtaggccttcttcatctccttgttcatcaggaaggtgcaggagaggaaataggtgaaatgcgcgccgttcttcatcgccatctcgcggctcctttgccacagcgcgttgtcgtgggcgccgtcgaaggagatcatcaccagctgcttcggcttgtccgccggcttggcgtccgcgttgccgacgggcgcggcgggggcctcgaccggagcggcatcgacggcgggaggagcggtctggccggtcgggggctgggcgatcggggtttggccagtcacggtttgggttggcgtggtttggtccgttgcggtttgggctgccgtggcttgggttggcgcggtttgggctgtcgcgggggcgacggccggaacgagcatcgagagggcaagcgaaatcgaaaggcaggaacgtgatacgagcatggagaggctggaacgagagatactgaaagacataccgggagagatactgaaagacatgggcaccgcgacaatttgtttcgggcttttctggtacagaattgaggcgaagctgcggtgccgctggcattttccgatcggtgaagctaagcctgtctcatagtcaaaacaggaatttagcgatgcagctgctaatattgagcctcgtcctctttatcggccttcacctgatccgcgtggtcgtgcctgatctccgccgcgcgatgatcgacaagctcggcaagccggtctggggcgccgtgcatggtatcttgagcatcgtcacgctcctgttcctcgcctacgccttcgatcaggcgcgcggcatgtacggcacgctctacaatccgccggtctgggtggcgcatatcacgctgaccttgatgctgatcgcggtgatctgtctcgtggcgggcttcctgcccgccgggcacatcaggaccaagctcaagtttccgctgctggtggcgatcaagatctgggcgctctcgcatcttctggccaacggcgaacccgaggcgatcgtgctgttcggcgccttcctcgcctgggcggtgctgctgcggatctcgatgaagcagcggctgcgcaacggcgagatcaagctgccggtcttcgtgtcggccaagtacgatctctatgccgtgatcatcggcgtggtgctttgggcggccattctcttcaaactgcacgaactggtgatcggcgtttcaccgcttgtgatgtaacgattcttacacatcccccttacaacggctgcaaaatggggtagaaggcccgacaatgtgcgtgcaacccgcatgattttgcatatccgggccggagacgagaatggcattcaacgacgatagcttcattcgtgaagtcaatgaggaactgcgatcggaccagatgaagggtgcgtggcatcgcttcggccgctacctgatcgtgctggccgtcctcatcgtcctcggaacggtcggctacaaggtgttccagtattgggacagcaaccagtcgtcgggcaccggcgaccagttcatcgccgccatgaagcttgccgacgagaacaagagcgacgaggcgctgacggcgctcgaaaagctcgagaaggaaggctatggcgactatccgatcctggcgcgcctgcgtgccgcctcggtgatcgcgcagaagggcgacgccgcgggcgccgtggcggccttcgacgtgatcggcaaggacgccaaggcgccggtcgccatccgcaacgccgccaagatccgcgccgcatggctgctgatcgaaaacggcacctatgaacaggtctcggcccaggtcgaggaaatggccgttccgaccaacccgttccgccactccgctcgcgaagcgctcggccttgccgcctacaaggccggcaacatggtccaggcccgccagtggtaccaggcgatcgccgacgatgcgcagacaccgcgcaatgttgccaatcgcgcccagatgatgcttgataacatcattgcatccggcaaggcgcccgccgcacagggctgagtttagggtatttcaatgagctttacggtcgcgatcgtcggtcgcccgaatgtcggcaagtcgacgcttttcaaccggctggtcggaaagaagctggcgcttgtcgacgacacgcccggcgtcacccgcgaccgccgtccc

SEQ ID NO: 48 - DNA, 18881 bp, Rhizobium matallidurans
  source 1..18881: mol_type = genomic DNA
cctcgaaccaccggtccttggtcaccttcccgaccaaccacaacatccgctccatgatcccatcgacatcgatcctggcatcatcgtcatcggcaggcggcggcgtgtggttgccgggctgcagatagaccggcaaatccggataccgccccgcaacctcccgcgcgtagcgataatcccgctcgtcgaacaccacgatcttcagcgcgacatccggcccgccggcggctcttgccagacaatcctcgaacagcgcccagtccgtctccatgccgctcgacggcggcttcgggctcagcaccagcgtatcgagatcggcaaaccagtctttcgcgacgctgccctgcgtttccagcgcgaagcgatagccttcggcgtgtccgcgttcgatcagcgggccgagcggctggatggccggattgccgccggaaagcgacacggtgagcggccgcccacccgagagtgacacgacctccgcccagatctcctccaccgtcatcggcgtccattgatcgcgatattcgctgtcgacggcatgcagcgtatcgcaccacgaacagcggtaatcgcagccgccggtgcgcacgaacaccgtgggcaacccgatcagcacgccctccccctggatcgtcggcccgaagatctcgctgacgcggatccgacggtcggcgctcatggccgatactccgcccaggtcttcggcgtctcgctgacccgcacggccgaggtctccggcaggatcgccttgcaccagtcaaagaagtgcctggcgagatattcggacgtcaccctgttatgaccgagcacgtcgttcagatgccggtggtcgaaacgctcgtcgatatagcgcttcagcggggcaagctcgtgataatcgcgcacgaagccatcctcgttgagctctgaagccgccagttcgacgacgacgatatagttatgcccatgcagccgcgcgcactggtgatcggcgggcagatgcgagagctgatgcgaggcggaaaagtggaattccttggtgatgcggaacacggggctacacctccgtggccgcgaagcccgatgtcgccgacttccagaaatcggcgtcctcgtactccgtcgggtccgcgacgccggccagatgaaacgcctcgcgccgctcgacgcaggtgccgcagcgcccgcaatggcgcgccccgcccttgtagcaggaccacgtctctttgaacggcgtaccgtgcttcgcgccatcggtcacgatatcggccttggtggcgttgacgtagggcgcctgcagcctgacgctggcatagccgtcgagcgccgcatcctgcatggtctgaaacgcgtcgatgaagccggggcggcaatcgggatagataaagtggtcgccgccatgcacggcaacagccacggcatccgccttctgcgcggcggcaagcccgaaggcgatggcgagcatgatggcattgcggttcggaaccacggtcgccttcatcgtttcctcggcatagtggccatcaggcacgtcgatatcgtcggtcagcgccgagccggtgagatggctgccgatcggcctgatatcgatgatctgatgcggcaccccgagcctgacggcacaggcggcggcataatcgagttccttgcggtgacgctggccgtagtcgaaggagagcaggccgatgagggtttgttccgcggcgatcctgtgcgcaagcgaaacggagtccaatccgccggagcagatgacgatggtcttcatgatgtttgatcccttgttttgaccgggtgggctgcgaccggatgggcgggttctaggccaaagagaccgcattgtgaagaaccaatcgaacccccatatttaatgggtagagcagcacgactacctgagagcgtggcttttgaaatcgtctcggttaaggtgcggctattcgattcgggttttggggagatatttcatggttttgggcggcttcgacatcgtggtcatcgcactggtggtcttcgtcatcctggtgctcttcgccggcatcaagacggttccgcagggttatcagtacacggtcgagcgcttcggtcgctacacccgcacgctggggccgggtctcaacatcatcacccccttcatcgagcgcgtcggcgcgcgcatgaacgtcatggaacaggtgctcgacgtccccacgcaggaagtcatcacccgcgacaacgcctccgtctcggccgatgccgtcgccttctaccagatcctcaatgccgcccaggcggcctatcaggtcgcaaacctggaaaacgccatcctcaacctgaccatgaccaacatccgctcggtcatgggctcgatggacctcgacgagctgctctccaaccgcgacgccatcaacgaccgcctgctgcgcgtcgtcgacgacgccgtccagccgtggggcatcaaggtcacccgcgtcgagatcaaggacatccagccgccgcgcgacctcgtcgacgccatggcccgccagatgaaggccgagcgcgagaagcgcgcccaggtgctggaggccgaaggatcgaggaacgcgcagatcctgcgcgccgagggctccaagcagtccgccatcctgcaggccgaagggcagcgcgaagccgccttccgcaacgccgaggcgcgcgagcgcctggccgaggccgaagccaaggccaccaagatggtctccgaagcgatcgccgccggcgacgtgcaggcgatcaactacttcgtggcgcagaaatacaccgaggcgctgaccgcgatcggctccggcaacaattccaaggtcgtgctgatgccgatcgaggcgtcggccatcctgggatcgctgagcggcatcggcgccatcgccaaggaggtcttcggcggcggcgacaacccgccggcagcccccgcgccgcgccaggtccaagccccgcgcaccacgccgcaggtcaaccccttcaaccagaatccggagcgctgatcgatgctgtcggccatcacatcggaacttgggccctggagctggtgggtcgtcggcctcgtgctgctcgccgccgagatgctggtgcccggcttcttcctcgtctggatcggtctggcggcggtcgccgtcggcgcgctctcgctgctcttctgggatagcgccgtctgggtctggcagttgcaggcgatcctgttcgccgccttcgccgtcgccgccaccttcatcggccgcaagctgacgcgcgatcacggcaacacggacgaacccttcctcaaccagcgcggcgccagccttgtcggccgcaccgcgacgctggccgagccgatcaccgagggtcgtggccgcatcaagctcgacgacacgcaatggaaggtgagcggcccggacctgccggtcggcgcacgcgtcaaggtcatatcaagcaacggccgcgacctgacggtcgaggaagcctgagaactcagctctcaaggccgcatcgagcgggatggatcaggcgaggctcaggccacgccgatccgcaaaagatcgtggaaatgaatgagcccgaccggcctgttgtcgtcgtcgacgacgatgagagcgccgatgctgtgcttgttgagcaatgccagcgccgcggtcgccagcacgttgggcttcaccgtcttcggcgcccgcgtcatgatgtcgtcgaccacgagctccgacaggttgcgcgacaggttgcgcgccatgtcgccctcggtgacgataccgcagagccggccgtcctcgtcgagaatgccgacgcagccgaaatgcttgcgcgatagcgtcgagatcgcctccggcagcggcgtgccctttgcaaccagcggcacgcgctcgccggtatgcatgacgtcggcgacgtggctcaaggcagcgcccagcttgccgccgggatggaacacatggaaatcgcgcgccgtgaagccgcgcgcctcgagcagagcgatcgccagcgcatcaccgagcgccagctgcatcatcgtcgacgtggtcggcgctagtccgtgcgggcaggcttcctcgacattcggcatcaacagcacgacatcggacgccttgccgagcgacgagtcgggcgagcaggtcatggagatcaagggtatggagaagcgacgtgtataggcgatgatgttgcgcagctcgacgctctcgccgcccttcgacagcgccagcaccgcatctccgcgtccaaccatgccgagatcgccatgattggcctcggcggcgtgcatgaagaaggcgggcgttcccgtcgatgccagcgtcgcggcgatcttgacgccgatatggccgctcttgccgacgccggtgacgatcactcgtcccgatatcgcgccgatcgtctcgacggcctgcaggaatggcgcggcgagatcgccgtcgaaagcctgttcgagggtggccagcgcctgtctttccgtcccaagcgtgcgcctggccgaatcgatcacgccgttgtcgatgagatttaccgctcgcttgatcatcgccctccgttagccgctttcgcgcatcctgtccaccatggcggcggattgcgcacaggcggcggccgattggcaacgaatggttaaccacgaggctttacgttcgggtaaccacttcgaagcatgccgagcgctagtacatgggccattggagatatacgagcagtctgacgccgctccgcgcggcgggcgttgccgtgtcggtggttctggccggtcttgcgctcaccgccccggcttcggcgctcgcccagtcggcccgcgcttccgcatcgccctatccgctcggccagtcggcctatatcgcgacgcccgatgcaacgggcgaccagccggatgacggcacggccataccgggtgctgcgacatcccccgacgaccccgccaatgccggcgcggcaacagccagcggcgccagcaccgccgcgcggcaaaccctgtcgggcgaccagacgagcgacgagaccaccggctcgatccttgacgaagacatgatgcggctgaacacccgcgaggccccgttcgacgaacgacggcagcgcaagcccgatgtcgatctctcgaccgaggaaacgccgggcatccgcatcggcaccttcgtgctgcgcccgaccgtcacccagagcatcaataccgagacgcagaaggacggcgacaccaaggaaacccgcgccttcctcgaaaccgacatgaagaccacgctgacatcggactgggcgctgcaccagctgctgatatcaagcgagggcgcgtggcagaagaacgtcagcggcgagggcgcggagcagccggacttccggatcaacggcgaactgaggctagatctgccgcaggaaaccaccgcccgactgacgggcggctaccgcttctatcgcgaggacaccaacgacccgaacgccattcaggatgccgaccagcagtcggatgtgcaggaactcagtctcggcgcgtcgatacagcgcgacttcggcatcctgcgcggcaccaccggcatcgacctgacgcggacgatctattccgacgcaacgctttcggacggcacgctcgtgtcgctcagcgaccgcgaccagaccgcgggcaccctgcgcggccgcatcggctacgagctgtcccccgccctcatccccttcatcgaaggcaatgtcggcaagacggtctacgaccagacgaccgatgcatcgggctatcagcggtccggcgattcctatggggcaaaggccggcgtcgaggtcgacctcggcgaaaagctgcgcggtgaagttggcatcggctacgagatcgccacgttcgacgacgacaggctgtccgatatcgacgcaaccgtgctcgatgccagtgtccgctggtcgccgctgcgcggcacggatgtcgatttcggcctgcagacgagcctgcagccatccaccacgccgggcgtgtcgggctatgtctcccgcgccatgacgacggcggtcacgcatcagctgcgcgacaatctcgtcggaaccttcctgggcggcataaccttgcgtgactatccgtcggacagcacgatcagcgacgaaacggtctatacgaccagcgccggcctgacctggaacatcaaccggtatctcgatctgacgagcaccatcggctacgaactgacctccagaaagacgggcgccgactcgcagcaatggcgagccggcgtcggtctgaagcttaaacgctgatagcgatcgggaagaccgcgccgcggcctccccttttttcgcctggtatcagagacccttgagcaggtccttgaagccgtcgatcacggtcgggcggatatccgcgcgctcgagcgcgaaggcgacgttggcgaggatgaagccatccttggcgccgcagtcataggtcgtgcccttgaagtggtagccggcgaaatcctggtccttgagcagcttcagcatgccgtcggtgagctggatctcgttgcccgcgccgcgttcctgggtttccaggatcttgaacacctcgggctgcaggatatagcggccgttgatgaagaagttcgacggcgccgtgcccttggcgggcttttcgaccatgccggtgatgcggaagccgtcaccgatcgcgtcgccgacgccgacgatgccatacttgtgggcctggtccggcgcgcattcctcgacggcgatgatgttgccgccgctctggccgtaaaggtcgatcatgcccttcatgcagcccttgccttcgctcttcatgatcatgtcgggaagaagcagcgcgaagggttcgttgccgatgatctcgcgggcgcaccatacggcgtgaccgagaccgagcggctcctgctggcgggtgaagctgacggtaccggccttgggaagctggcccgcgagcagcgtgatctcggcgttcttgctacgctcgcgcagcgtctgctcaagttcgaaatggatgtcgaaatagtcttcgatgatgtgcttgttacggcccgtcacgaacacgaaatgttcgatcccggcttccagcgcttcgtccaccacatactgaatgatcggcttgtcgaccacggtcagcatttccttcggaacggccttggtggccggaaggaagcgcgtgccgagaccggcgaccgggaatacagctttgcgaacttttttatgctctgccacacaggcctcctgcgatgattctaacgcttgaaatataacgcgattttgatcggattagatgagatttgctacggttttgcaaatagtgactgggttcgtgcgtcatggtaaagaatttgttgactccgttcgggtagtctcaggtccgagcggaaacttcgcgctctgctgtgcctgaaacgaaaggacggatgaccgccgatgactcaaaatcacaaaatctcccttcgtggtcttgcattcgcattcatgatgaccgcatccgctagtctggcgcctgtaaacgccatggccgaccagcggttccagaagtggatcgcggacttttatcaaactgccgctcaaaatggcatcagcaaggcaacttatcgtaaagctttcgccggcgtcaccgcacccgacccgtcggtgctggaaaaggctgcctatcagcctgaattcacgacgaaaatctgggattacgtggattctcgcgtaaatccctataccgtccagatcggccgcaagatgatggccaagcacgcctctacgttgaattggatcgagcgcaacttcggcgtcgacaagacgattctgctggcgatctggtcgatggaatcgaattacggcgccgttctcgagaaggacgacaggctgcattacgtgccccgcgcgctggccaccctcggctatgccgaccagaagcgctccaggttcgcggagaagcagctgatcgccgcgctgaagatcctgcagaacggcgacatctcgcccgacggcatgaccggctcctgggccggcgccatgggccacacgcagttcatccccaccagctacctgctttacgccatcgacgccgacggcaacggccaccgcgatatctggaactcgattccagacgcgctggcgacctccgccaatctcctgaagaagaacggctgggacaccggcaagacctggggctacgaggtccaggtgccggcgagcgcggcaaagtacgtcggcaagaccatgacgctgtcgcaatgggcggcactcggcctgaagcgcccgagtggcatgggcttcagggacggcggcggcaaggcggtcttgaagatgcccgccggcaacgacggcccgggcttcctgatgaccagcaacttcttcaccatcaagaagtacaattcctccgacagctatgccatcgccgtcggcctgctcgccgacgagatcgccggctatggcggcatgaagcagcgctggccgcgtcccgatggcacgctcgacgtcaaggagaagttcgagctgcagacccggctgaaggcgctcggctattacgacggcgaggtcgacggcaatttcggcagcggctccaaggccgcgatatcggccgtacagggccggatgggcatgcaggcggatggcgaaccctcgctgccgcttctgaacgcgctgcgcaagtagcacctcgcgtcgcgatcaaaaacacgcgcaccgcgctttggggtgtggacgcccgtcccgctccatgagaaaataagcgtcgatgcgaggcggccgacatgtgtaaacgagtagacaggacaatgaccgccggcggcgttagcggaatgctgcgctggggtgcgctcagcgctgcggtgctggtcttttcgaccgccgttctgccggccgtttcggccgaggcgcaggaacagcgctattatcagcgccgctcacttctcgatctattcctgggccgccgctatatcgacgaggccccgcaggcgcccggccagtatgcgccgcagcgcgccgtcccgccacgcaagaagaaggcgccgccgaaggccgccgtctccgctccgcgccccgcgccggtgatcgcgccggaagagaaggtcgtccagaagctcgacaacgcccagaagatcatggtcgtcggcgactttctggccggcggcctcggctccggcatggacgccgctttcaaggattcgcccggcatcctcatcgagacgcacagcaatgtcgcctccggcctggtgcgcgacgactactacgactggccgacgcagctgacgaaattcctggacgaggccaagcccgccatggtcgtcgtcatgctcggcgccaacgaccgccagcagatggtgaccgatgccggcaaggagaagttccgcaccgatgcctggtacgaggaataccagcgccgcgtgctggccttcggcaaggcggtgacgtcgagaaagatcccgctgctctgggtcggcctgcccgccttcgattcgcccgcgatgatggcggacgcggtgcagatgaaccaggtctaccgcaagcaggtggaatcgatcggcggcgaattcgtcgatatctgggatggtttcgtcagcgagagcggtgacttcatcgtcaccggctccgatatcaacggccagcaggtgcgcctgcgcgccgccgacggcatcaacatgaccgaagccggccgccgcaagatcgccttctatgtcgaaaagccggcccgccgcatcctcggcacccaggcaagccccgatctcgtgcgcctcgacaacagcagcgcgccggcgctcgacctgtcggcgaacccggccgatcacaccgacccgatcgccctctccgaccccaacctcgacggcggcacggcactgctcggcggcgccgcactccccgtgagcaccacgaagtcgccgcgcgacaagcttgtgcaggacggcgagatggccaagccgccggtcggccgcgtcgacgactacagccgccccgtagccaaatcggccgccgaggtctcggtcaagtagaagcgggcctgcgcacgcacggcctctgtctcaactcgaaacatccgcgcccagcggcgggctcccacgggcatagcgggcaggcggcacgcccgcatatcgcgagaaggcgacgctgaacgcgcttgccgagccataccctacgcgctccgccacctcttccatcccgagatcccggccgcgcaacagctgctttgccagcgccatgcgccaggccagcagatattccatcggcggcaggccgacgacacgactgaaacgggcgaagaacgccgatcgggagagtgacgcttcggccgcgagatccgccacggtccatgcacgcgccggcttttcatgcaacgcgtgaagcgccgtcgccagccgttcatccgccagaccccggctgagccccgccgcgcctgtcggctgtgtgccggatctgagcgcctcgatcagcaacacctccagcagccgttcgatgaccagctcgcgccccggccgccgctcgcgcgtctcctcgtcgaccaattgtatcagcgtggcaagacgtggctggttgcgaacgatgaccacgtcgggcagaagcgaaaccaggagcgccgcatccggcgaaccgaaactgcaatgcccgatccgcatgcgcaaatccggcggcccgtcgacacgaccggcgcggaagcgtccatcgcccatctggattggaacggctgatgacaattcgcctggtgcgtcgatgctctcgttgaccagatcgcgcatggccggcaccagcacgaagtcgccggcctcgagtatgaacggcggctgctccccgaatgccacgcgacagcgcccctcgagaatggcgcaatagaaaggctcaccggtggcctctcgatggattcgccaggcgccggcgcattccaccagcttcgagaagcgtgcggcgggctgtagcagggtgacgatttcggcaagaggatcaacggccacgatcaggactatctctaaagaaataaagacttcagcctatatcaagtcttgaacgcggtcactaccctgcgatcattccttttcaattggagacgcagatgcccacgatactgatcaccggttgctcgtccggttttggcctggagaccgcgaaactctttcttgaacgcggctgggacgtgatcgccacgatgcgcaagcccgatccggacctgctgcccctgtccgaacgcctgcgcgttctggcgctcgacgtcaccaaccccgcaagcatagcgcaggccgtggccgcggcgggtcggatagacgtcctggtcaacaatgccggcttcggagcaccctcacccatcgagctgacggcaccggagaccgtgcgctctcttttcgaaacgaacacgatcggcaccttggcgatggtccaggctgtcgtgccgcagatgcgccggcgccgggcaggcgtcgtgatcaacgtcacgtccacggtgacggtcaagacgctgcctgtgatcggcgtctatcgagcgagcaaggccgcggtgaacgcgctgacggaatcgctcgcggtcgagatggaaccctttggcgtgcgggtgcatatcgtcctgccgggccgctcgccagccacgcgcttcggtcagaacgcgcgtccgcatttccgtggccttgacgatgcggactatgcgccgatgctccagcagttcatcaacagcgtgcaggacgacaccgggcccgtgacccatgcctccgacgtcgccgaggccatctggcacgccgcaaccgatccctccgcgccgctgcgcattccagccggcgccgatgccgaactctggatgtccgaggcgggcttctagaatagttgcgcaagaaacgcggggccgcgtcaggcggccccgagccaacatcgatcgcgtcggctagctccgctgcagcgccagatgcgcgccgagaccgatcagtattccgccgcccgcacgctgcaccagccgctgcgccgatccggagcgcttcagcctggagacgacggcgcccgccagcatgacgcagacgatatcggccgacgagaagatgagattgacgatcgtcccgagcagcacgaattgcagccaaaccggaaagctcgcggcaggatcgataaattgcggcaggaaggccaggaagaagatcgccgtcttcgggttcagcacctcgatcgagatgctctcgacaaaggcgcgccgaccggacctgggatcgagggcggcaagcgtcggctcgccctgaggcttcgcgcgaaacagcgatatgccgagataaaccagataggccgcgccggcgagcttgaccgccatgtagagcacgggcacggcgtgaaagatgatcgacaggcccgccgccgccgcgatcacatgcacatagcagccgatatggatcccgagcgtcgccatgaaccccgcgcgccgtccgcgcgccagcgtctgggcagcggcgtagagcatggccggccccggaatataggcaaacaaggcggttgtgacgaagaaggtgatcagcagttcggtggatggcatatggcgttgtcccttgccggcgtggcccccgcgacgcgatggcgcccacagcatcgatcgccgtagcgcgcttgaccatgccgcaagcatttcatgccatcgcccgcgcaacccgataaaaaagctcggggccgcgcaagcgcagccccgagccgaaatcaatccaaacgtcccgtccgctcagcgcggcagaaccgtcgagcccatcagcgcctcgtcgatggcgcgcgccgcctggcgtccctcgcggatcgcccagacgaccagcgactggccgcggcgcacgtcgcccgccgtccagaacttgtcgatcgaggtcttgtagtcgcgatcgttggcgacgacgttggtcgagccgcggcggtcggtgttcagcgtcaacttgccctcgagttccttgagcacgctcgtggtgaacgggccgctgaagccgatggcgatgaaggcgagatcggccttgatgatgaactccgtgccggcgatcggcttgcggcgctcgtcgacttcgcagcacttgacgccggtcaggacgccgtcttcaccgatgaattcgagcgtcgccacctggaattcgcgcacggcgccttcagcctggctggaggaggtgcgcatcttggtcgcccagaacggccacaccgcgagcttgtcttccttctccggcggctgcgggcggatgtcgagctgggtgaccttcacggccccctggcggaacgccgtgccgacgcagtccgatgcggtatcaccaccgccgacgacgacgacatgcttggcgcctgccaggatcgggtccgatgcccagccgacgctgtcgatgttttcgcggccgacgcgcttgttctgctgcacgagatacggcatcgcatcgtgaacgccggcgaggtcgaagcccggaatgcccgcctcacgcggcgtttccgaaccgccgcagtagagcaccgcgtcgtgatcggcgatcagctgctcgaccttcagatcgacgccgacattgacgccgcaatggaaggtcacgccttcgcccgaaatctgctcgacgcggcgatcgatgaagttcttctccatcttgaagtcgggaatgccgtagcgcagcaggccgccgggcttggattcacgctcaaagacatgcacctcgtgaccagcgcggccgagctgctgcgccgccgccatgccggcggggccggaaccgatgatcgccaccttcttgccggtgcggacggcggccggctgcggccggatgaagccgagctcataggccttgtcggcgatcgcctgctcgacggtcttgatggcgaccggcgcatcctcgaggttcagcgtgcaggcttcctcgcaaggcgcggggcagacgcggccggtgaattcagggaagttgttggtcgaatgcaggttctggatcgccgcttcccagttgttgttgtagaccagatcgttccagtcggggatctggttgtgcacgggacaaccggtcgggccatggcaatagggaatgccacagtccatgcagcgcgcggcctgtttctgcacttccgggtccgacatcgggatcgtgaattcgcggaaatgccggatacgatccgacgccggctgatacttcgccacctgccggtcgatttccagaaaccctgttaccttacccatgctgctgtcttcccttacactcatgaccgcctctttcgttcagcgcagccagttttcaacctttaatcccggcacgcgggagaattcgctttcgttgttcgtgaccagcacagcatcaagagccagtgcatgggcggcaatccagaggtcgttcggaccgatatttttcccctgcctcagcgccagccgaatgtcggcataacgttgatccgtcggcaaagtcagcgaagccacataaagacggcgcgtgacgttggaaaccttcttagccagttcctcggacccgttcttcctgaccccgtaccagatctcaccgtgggtgatgatgctgatgcagacgttctcttcaccaacctcgatcaaccgctccaatgccttgcctcggggatcacgcacgatcgccgagacaatgttggtatcgagcatgaacctcgtcacagatcgacttccggcaattcggcaagatcgtcgttatcggcagcgaaatcggcgccttcccatggctccgctcgttgcaggtaatcgatcaatcctgccgtgacggcggttcgcatcatgatcgagccatcaggctgcttcaccaaaatggctttcgcaccatcgaattcgatctctttaggtatgcgcaccgcacggcttcggccgtttttgaaaatggcgacttcaatctcgccattctctgggatgtccttcacatgctcgttcatgctgacctccatcgctgcatatgccaacagcatatcacaccgttgagatatatgaaatcactccgcggcgatccccatccggctgcgctccatttcctcgagcgcgcggcggtattcgaccggcatgaccttgcggaacttcggacggtactccgcccagttgtccaggatctgcttggcgcgggtcgactccgtgtagtgcaggtggttggagatcagctggtagaggcgttcctcgtcgtggcgggtcatgtcgccggaaacgtcgacgcggcccttgtgcgcgagatcgccgccatggtgatgcagcttctccatcaggtcgtcctcttccggaaccggctcgagctcgaccatcgccatgttgcagcgcttggcgaaatcgccgctctcgtcgagaacataggcgacgccacccgacataccggccgcgaagttgcggcccgtctcgccgagcacgaccaccacgccacccgtcatgtactcgcagccgtggtcacccacgccttcgacgatggcgatggcgccggagttgcgcaccgcgaaacgctcgcccgccacacctcggaagtagcactcgccctcggtcgcgccgtagagcacggtgttgccgacgatgatcgagtcctcggcgacgatcttcgagttctccggcggacgcacgatgatcttgccgcccgagaggcccttgccgacatagtcgttgccgtcgccgatcagcttgaaggtcacgccgcgcgccaggaacgcgccgaacgactgtccggccgtgccgcgaagcgtcacgttgatcgtgtcttccttcaggccgcgatggttgtagcgcttggcgacttcgcccgacagcatcgcgcccgccgaacggtcgacgttcttgatgccgacttcgaacgacacaggcgtcttcgacgcgagcgccggctcggcttccgcgatcagcttgcggtcgagaatgtcgtcgatcgggtgcatctggcgcgtcgtccagtaggtagcttccttcggcgcctcgaccttgtggaagatgcggctgaagtcgagacccttggacttccagtgcgccagcatctcgtccttctccagcagctccgaagcgccgatgatctcatcgagcttggtgaagccgagcgaggccaggatttcgcgcacttcgttggcgacgaagaagaagtagttgacgacgtgctccggcgtgcccttgaagcgcttgcgcagaaccgggtcctgcgtggcgacgccgacagggcaggtgttcagatggcacttgcgcatcatgatgcagccggcggcgatcagcggcgcggtcgcgaagccgaactcgtcggcgccgagaagcgcaccgatgatgacgtcgcggccggtcttcaggccaccatccacctgcagcgcgatgcgcgaacgaaggccgttcagcaccagcgtctgctgtgtctcggcaaggccgatttcccacggagaacccgcatgcttcagcgaggtgagcggcgatgcgccggtgccgccgtcgaagccggagaccgtgatatggtcggcgcgcgccttggcgacgccggcggcaaccgtgccgacgccgacttccgagacaagcttgaccgagacatcggacgtcgggttgacgttcttcaggtcgtagatcagctgcgccagatcctcgatcgaatagatgtcgtggtgcggcggcggcgagatcaggccgacacccggcgtcgagtggcgggtctttgcaaccgtcgcgtcgaccttgtggccgggtagctggccgccttcgccgggctttgcgccctgcgccaccttgatctgcagcatgtcggcgttgacgagatattcggtggtcacaccgaagcgtcccgatgcgatctgcttgatcgccgagcgttccgggttggacgaaccgtcgggcaacggcatgtagcggtcgctctcttccccgccttcgccggtgttggacttgccgccgatcttgttcatcgcgatcgccagcgtcgtatgcgcctcgcggctgatggagccgaacgacatggcgcccgtcgagaaacgcttgacgatctcggcggccggctcgacctcgtcgacggaaaccggcttgcggccgagctgctcggcgctcttgatgttgaacaggccacggatcgtgttcatgcgcagcgccgatgtgttcaccatctcggcaaactcgcggtagcggtcctcggcattgccgcgaacggcatgctgcagcgtggccaccgcatccggtgtccaggcatggctttcgccgcgcatgcggtaggcatattcgccgccgatatcgagcgtggtcgccagcagcgggtccttgccaaaggccgacgtgtggcgggcaacggtctcttccgagatcgccttcagatcgacgccttcgatcatcgtcgcggtgccgaagaaatacttgtcgaccagctcctgctgcaggccgatcgcatcgaagatctggccgccgcaataggactgataggtcgagatgcccatcttcgacatgaccttgaggatgcccttgccgaccgccttgatgtagcggtagacgacttcggacgcgtccacttccttcgggaactcgcccttggcatgcatgtcgagcagcgtatcgaaggcgagataggggttgatcgcttcggcgccatagcccgcgagcaggcagaagtggtgcacttcgcgcggctcgccggtttcgacgacgaggccgaccgaggttctgagacccttgcggatcaggtggtggtgcacagcggcggtcgccagcagcgccgggatggcgatgcgatccggcccgatctggcggtcggaaagcacgatgatgttgtagccgcccttgacggctgcttccgcgcgctcgcagagacggtccagcatgtcgggcatgccttcggcgccgcgctccacgtcataggtgaagtcgagcgtcttggtgtcgaaacggtcttccgtgtggccgatcgagcggatcttttcgagatcgccattggtaaggatcggctgacgcacttccagccgcttggcgttggccgcgccctcgtggtcgaggatgttgggacgcgggccgatgaaggacaccaggctcatgaccagctcttcgcggatcgggtcaatcggcgggttggtgacctgcgcaaagttctgcttgaaataggtgtaaagcagcttggacttttccgacatggccgagatcggcgtatcggtgcccatcgagcccacggcttcctggcccgtcgtcgccatcggcgacatcaggattcgggtgtcttcggtggtgtagccgaaggcctgctgacggttgagcagcgacacgtcgcgacgcagcgcgcgcggctccaccggcttcagttcctcgaggatcagctgcgtgcgatcgagccacttgccgtagggatgcttggtcgcaagctcggtcttcagctcctcgtcggagacgatcttgcccttctccatgtcgatcaggagcatcttgcccggctgcaggcgccacttcttgacgatgtcttcttcagcgaccggcagcgtcccggcttcggacgcgaggatgacgcggtcgtccgacgtgacgagatagcgggccgggcgcaggccgttgcggtcgagcgtcgcgccgatctgcttgccatcggtgaaggcaacggcggccgggccgtcccacggctccatcagcgctgcgtggtactcgtagaacgccttgcgttccttcgacatcgactggttgccggcccaggcttccgggatcagcatcatcacggcatgcgccatggagtagccgccgcgcacgaggaactcgagcgcgttgtcgaagcaggccgtgtccgactgcccctcgtaggagatcggccagagcttggagatatcctcgccgaagagcggagacgacaccgaagcctggcgcgccgccatccagttgacgttggagcgcagcgtgttgatttcgccgttgtgggcgaccatgcggtaggggtgcgccagcttccaggacgggaaggtgttggtggagaagcgctggtgcacgagcgccaccgcggactcaaaacgcgggtccgacagatccttgtaataggcgccgacctgataggccaggaacatgcccttgtagacgatcgtcgaggacgacagcgacaccggatagaaatggctctcctcgccttcgaactcgtcgtagatgcggttggagatgaccttgcgcagcgtgaacagcc

SEQ ID NO: 49 - DNA, 18355 bp, Rhizobium matallidurans
  source 1..18355: mol_type = genomic DNA
gccatcgttcgcgaaagcgatagcgctttggtggatgtcacgaccggtgatgtcatcgctcatccagacgagcaagccgactattgtggcgccgatattctcggttacctgggatactgatcaatggcagtcggctatcgcgggaggatcgttaccgggatcggcgaagaccacagttgggcttcgttcgctttagcgaatagagccgtacgccaaaggcggaccgcccaatgctccttctgtccatacttcacaaaactgaatcgttccgcgaccatcgattcacaactgtcgttggacgcatgggcccgattgcgcgatcctctcaccatgatcgcccagccctatcacctctatatcgaacgcacggatgctgagaagaatatggcacgcttctatgccatatcgatcgagccgaccctcttcggagaggcctgtcttatgcggcgttggggacgcatcggaaccagaggccagctcaaggttcatcacttcgagcaagagaaggacgcggttgaattgttcctcgaactcgtcaggcaaaaacgccaccggggataccgtacaatcaactcggcgcaacatacgtaccgggacagctcgcagtggccttagcgccagcttcaccgaagagcgatatgaaaaccatctctgacgggtcgaattcaaattgagaaccatggaattgcagaagaatgaccatagccttcggccagaggtccgttatcccgtgaaaaagatcatcgtcgcgatcgcagtatccggctgtgcgctgggcgctcacatatttgggatcgttccagtcgccgaggctgcaagcttggtcatcagtccggagacgacataccggaaatgtttcggtggtgatcgcttcgcttgcgtcgtggacggagatactctctggattgagggcgcaaaaatccgcattgccgatatcgacgctcccgagatcagcgagccgaaatgcgcaacagagctggcgcttggaaatcgagcgactgatcgcctgattgaactggtcaatcagagttccttcaagcttcgcgcatggcccggacgcgacgaagacagatacggtcgcaagctccgcgtcctcatccgtgacggcaggagcctcggcgatatcctcgtatcggaaggcctggccagaacctggacgggccgtagacagccctggtgctgaaaccggcccacgattgctggccgttgcacaacgccgttatcggcgcctgctccaatctgtttcaaaggagatctcgatctcgacgaagaacgggatcttgatcgcgagcttcaggccgagtttgcccttgcggaaaaagtggccgataaccttgccaagggaagaaagcttgcggcctgtggcggccaggaattgtgcgaggcgttgcatggtggtttctcctttgtcgattgcggacatcgcagggatcggccgcaggccgggacaaggagggttgcatcggtacggccgcagcgaagcggaggacttatcgacacctgaattttggcgcgcgaggagacgcgaagcggcggggaaaattctgatggcgatgagttgctgcccgacgaccggaccgcaacatccctgatgtcgatggcctcgctcgacaaggacaccgtgcaatgtctccgcctttcgacaccttacacagagaccacgcctggctgtgtagtctaccgccctcagaagggcggttcggcatcaacgcttccgtcctgctctgccgtgatgattgccaactccgcttgagccaggtccagctcggtctggatctcgcggcgctccgcagcgtcgcatgcgttcttgagctcggcgcgcagttcttcgatgtgctgttcgatcgtcatcgtcccatctccttgagtttgtgaaagacgaaaccgcagggcgggacgggatggcggggtcagggatcgctgatgcgaccgccagcggcggcgagtgggggagccgattttgttgcgtagcggcaaaattgggggaaccgctcgtccttgacgccgtcattccggcccggcaccctcgcccgatctgagcagctatccccatctcggtatgccaccaaaaaagcaggacctggctcgatgccgggtcctgctttgacttctcggcagaggagaaggctccgccggcggcggagccccgtgatgtcaatcagtcccggttcgggcgggaccagatgagctggaggccatcctcgccttcaacttcggcgagcgttgcgtagatcggagctgggaagctcggatcgtcgagcttgaccgagaggtagtcgcggccctgttcggaggttttctgccaggcggcgcccagctcgacgctgccggcgtagacgcgaaactgcgggcccttgtcggaggggttttcgacccgggcgatgcgggccttgacgttgagggcgagcgtgcggatggagccggtgaagccgttttcggtggaggtgaatgtgccgatggttgccattgtcgtattccttttctcgtgttcgggccgcgcccatcgcgacctcgatagctgtcaaaagaccggtgacgatcggaccgcacccaatagggccggaatgaaatggagggcggcaagtcgcagatttgttagtgggagaggaggagccgagctggggtccccgctcgacctgtcgagtggggtaggttggctccggggtaagaaatctgcggctagccgttgcgggaaaacgatcgaggcgcagccggtatccggtcagacatgcctcatcgagcccgcagatgggttgccggaaactctgacgtgaagggatacagcaacggtgctccgccgcactcgcccaggcacgaatggcatcttgcgccatcccccgcttcgaccgtcgttgctggcttcagtcggggacacaagttcgggctaacattggctcgcttgcccgatctccccggtgcgatatcgttgcacttgcgaatcgccgcctggaggatcaatgcatcagcagaccaagccgttcatcgtcgaacgtagaccgacccgcaaacccaaacccgacgctcaaaaaccgtcaatctggggaaggctggatgctgacatctcccaaggtctgaaggaccatcgggatgaggataacgcggccgccaccggtggtgccgaccgcgcctgaacgtcaggccgcagccttcaactccgcttccggctgcaaggaatgcaggaagctcaccgcgcgctgcgcatgagccgccgcctggaagatcgcccgcttgtcgttggccagtaccgatagccacgactgcaggtaggatgcatgatccggccgcggctcgagctccggcgcgatgccgagatcggcgcagaggaagcaactgccgagctcggctatatatcctgacagtccagtcctaatctgaattatttgggcgacgaagatcgtgcttgtcatgctgccatctcctctgcctggggttgctgggcatgcatccagtcggccgcctgctgcgccttgctggctgcggtgaagatggccttggggttgtccttcaggaccttcagccacgaggcgacgtaggcggcatgatcggggcgtggatggtgagcgacacccagatcagccaggacgagcccgctgagaatttccacgcagcattcttcggcggcatatgctgccgatccgaagcggccagagagatcgcggtcgagcctgtgcttggcgccgctggcatggccggtctcgtgcagccagacaccgtagaatgacgcagcgtcgcgaaacgaggtgaacgacggcatgaacaccgtgtcgttcgagggacggtaataggcttccgatccgccgaagacggtcttgacgcccagattcgcgatgaatgcttcagcgtgggcgagacgttcggcctcgggcagcacaggagtcgccgggcgctcatatccgtctatctgcgcgacggtgaagacaacacgaccgtcgtggagcgttctccttcgcgaacctgcgcgccggcgtcctgccattgcctgtaggtgccccaaaggccatcaccatagcctgcggcaaagccggcagcccacagcgccaaggtattgatgcctcgatatcgtttgccggaagcgatgttggtcgggcgggcgatgcttgcaccgttgtggaaccagggggcacgccattcacctgtgccctgttcgatggcggcgacgatctcggccgtgatgcgggaatagacatcggcgcgcgttgctgaactagaggtgtgggacattggggagtctccgcggccggcggcacgagcctctctcgccccttcaaccgaccgcccaactccagccttcctcttcctctcgcgccgtccgttcgggcggttgttcctggttctttcttgtcctgtcataatcgttgctccttctccgccggggcctgtcccggcgtcggagcagcgaaatgcgatgccttcaggcgtagccgcgcactcgaagagccgcagcgcacgcggaggacggcgagcagccgttgcgcggatgcgccgggcatcgcgcgctccgagaacgccgggcgggccgccggcgcagcagcaccgtacccactcacggttgtctctggaggatcaggctcgctgggccatcaggtcccggcccgctttcggaatgagccggatgtagacgagctcgctgagcagctcgacgagcgtctgcgtgacgataatggcgggcaggattggcaccgcgccgggaacggcgagaccgagcggaaggacgacgagcgaattgcgtgttgcagcgctgaatgcgaccgccctcgagccggcggtaggcaggcggaacaaacggccgatcatcaatcctgcgatcggggcgaccacggcgaacccgatatagatgggtacgacctgaagggcgctggagcgggcggcgtcgagttggggaacgaccgcgcagatgacgacgaacaggacgagcgcggttgccggaacgggtagtaaaccgagcaggtcagatgctcgggcgcccgtcttgctggtgcgagcccaatactggaccaggccagcaagaagcagcggaactgcaatcagccacacgaacgcatgggcgaagggctcgatctggatcaggttcctgctttccgctccaagcatcactccgaggtaaaccggcaggagcagcatctgcacgccgagcaggagcggtgtggcggcgagaaggccgcgcgcatcggcacggccaagatgcgagaaggtgacgacataatcgatgcacggagccagcaacacgatcagaacgccgagccgaatgagcggatcaggtggcagaaactggatcagcagcaggacgatcagcggaatgacgacgaaattggcgacgagaagcgccgccatgaaacgaagctggcggaaagcgcgaccgagatcggcgagcggcacctgcaggaaggtcgcgaacagcatcacggcaagcgccggattgatggctgcttccagcgtaccaagagctggcgccagtgtcgcggcgagggcagcgacgatcaccgccgcgaaatagatgacgacctgatgctgttcgagagattcgcgaagacctgaaaccgtcatgccggccgacgctccgcagtcattagcttcaggctgccgaggtcctccaggatgacgcaatcggggccgggtccgccggcgcaggcgacgttgcagctctccacgaagcccgcgatgctcttctcaagccccctcagttccttcagcttcacacgcacctccttcagatgttcctgggccagatcccaggcttcgaaacaggagcgactgcgatcctgcacgagcgatgtcagtgtccggacctgttcgatcgagaatccgaagtcccgacagcgctggatgaacgtcaaccgcttcacggcgtcatcgccatagcggcgctgattgccttcctggcgatcgggccgaggcagcaaaccgatctcctcgtaatagcggatcgtcggcgtgttcgtgccggtgcgttcggcgagctcgccgatcttcaatccaggcatctgcaaatcctcgaaaaatagcccttgaacttcaagttacttgaagtggcatctctatgccagcctgaaacatccactgaggagtcacgagatggatgacatagcaaccgagccgccgatcgcctgcacgctggacaccggtttgttcaaggaaagggtcgcgtggatagcagacctcaatgcgcgatcgctcacgtcgtcccggcgtcacgatcttgcactgacgctcgaatatcagcctgcggcgcgcgatgatgtgcggaaactggtgcgcggggagcaggcttgctgcgcgttcctcgacttcgatcttgatgaacacgccgacaagctggtcctgacgattaccgcgcccgagaccgcacgagatgcagccgacgtgctgttcgagcagttcgaggcaaaaagcgccgcaacgatctcatcttgcggctgcgcgccgggatgtgcggcatgacggcggagcgcagatcgggaaacaaggctgccggcgcggtcgcggtcaccgcctcgacggccgctctggcatgcggcgtatgctgtgttcttccatttgccgttccggctgcggttcttggctcggttggcggtgtcctcgcctggttcgcggaggcctatcgctggctgacaccggtcgcgctcatcgccgtcgcggctggctgggcatgggtcggataccagagctggcggacgcgccgctcgcccgcacgcctcaccattgtcgtcatgatctttgcgactgcgatgatggtggcggcgtgggtctggccggcattcgagggaacggcgattggcattctgaggtcctgaccgtcgaacgcaacgcgcttcgtcgttgcatgccttcgcacgaagggcgctcagcggtcatcgagggccggctgtctaaaccgagcgcggaccagcagcagaccgactatcgccaagactgcgaaccccgccccggcgaggaaagtaccttgcgggcctgccgcgtcccacaacgcgccggcgatcacgcttgctgcgagcaacgtcagaccggtgacaaggttgaacacgccaaaggcggtgccacgcagttccgccggcgcagtctcggcaataagcgttgcgagcagcccttgcgtgaaccccatatgcaggccccagagcacgacaccgacaccgataccggcaataccggatgcgaaggctaggatcagatcggcggcgatgagcaaggcgaggccaaggatcaggatcgtaacccggtccatccggtcagataggattccgatcggataggccgatagcgaataggcaaggttcatgatcaccaggacgatcggcacgagcgccagcggcaggccgatcgattgcgcccgcaggatcaggaaggcttcgctgaatctggcaagggtgaacacggtcgcgaccgccaccacccaccagtagctcgcgccaagccggctgatctcgtcgcgatgaagcggcatgcgaacacgacggagcttcttcggacgttcgggctcctttacggcaatcaagatcaagccgagagacaggaaggcgggaaggacagcgatccagaataccgcctggaaatggtctgcggtcaaccacattaggccgatggccagcagggggccgaggaaagcgccgatcgtgtcgagcgactggcgcaggccgaagctcgcgccgcgcagctcgggcggcgcgatatcagcgacaagtgcgtcacgcggcgcgccgcggatgcccttgccgatgcgatcgatgaagcgggcagcgatgagccagtcgatcgaggcggccaggggaaagattggctttgtgaaagctgcaaggccgtaaccgagggcggcgaggaacttgcgtttgcccagccagtcgctgagcgcgcctgaaaacaccttggtgaccgaggctgtcgcctcggcgacaccttcgatgatgccgacggccagcgtcgaggtgccgagcaccgccaccatgtagacgggcaggagcgcgtggatcatctcggaggagatgtccatgagcatcgagacgaagccgagcgcccagattccggtaggaatgccgcactgggttacgctgtccgtcgttgccttgacggcggttgcgagcgtcttgtcttgatccgccatctcatcggttctcgtcgtgggcgtcgaacacgcgtttcgcgtagctgtcgagcagcgcttcgcaggcccgaagccgttgcacggcttcttcggccaatgttgcgccgtagaagtcgagcttcctgatcttctcgagccatccctggagcttcttgaggtctgtgtcctcttcctccagttcggcataggtgaacttgttgatcgcgatctccttggcgatctcggcctcgaaatcgtcgcagcggccaaggaactcgcgatactgctcgtcgcgatcggccctgaagcgggtgatcaccttgtcctcctgggcacgatcgagggcgacggtttccaggatcacggcttcaccgcccatctctgctacgtcgttctccagcatcttgagccggcggacgtggtcgtcggtcttcggcagaaggcacacgccgttctgcagatagacagcacccatgcccttgagccggcgccatagcgcgatgcgcttggcggccggttcgggtgggactttgtaggtcagaagaagccaggatggagcggtcatgattcatcagtaatgaaacgaccgtaacattacaagagaaacgtcatcgaccgaaccatcggatcggcccgcctccgttctccggttcttgctattatgatataggggggtatactatcttgggctgagactggaggttcgcatgtcgcacacgacccgtgagaaacagaagctgctcaaccgcgtgcgccgcattcgcggccagatggaggcggtcgaacgcgcgctcgaagaggaaaagggctgcgccgcggtgttgcagctcatcgcgggcgtgcgcggtgccgtgaacggcctgatggcggaggtggtggaggaccacatccagcatcatgtggccgatgccgatctcgaccagaaacaacgcaatgagggcgccgccgaactgatcgatgtcgtgcgcgcctacctcaaatagaaccggagttggcgccatggccgttcacgacaccacccaccccgcaggctcgccgatgagcctcatgggcatgcggctgagccgcatcctcatgcgcatcaccatcatgatcatgagcacgacgatcacgatcatgggcacggtcacgatcacgaccatccgttcgaatggccggaagcagtgcggatcgcgcttgtcgcggtcgcggcggcggccgtctggttccaaatctgggagccattccaggctgtcagcgtcatcggcgtcgccggccttctgatcggcggctggccgatcctgaaggaggcattcgagaatatcgtcgagcggcgcatgacgatggagctgtcgatgacgatcgccatcgccgctgctgcggcgatcggcgagttcttcaccgcactcgtcatcacgctcttcgtcctcgtcgccgaggtgctagaggggctgacggttggccgcggccgcaaggccattcgcgacctgctcgaattcctgccgcgcgaagtctccgtgcgccgggctggagcgatccggtcggtctcggcggaggaactctcggtgggcgacgcgatcctggttgcgccgggcgggcgcataccggtcgacggcgcggtgctgtcgggtcactccttcgtcgatgaatcgcgcatcaccggtgaatcgatgcccgtcgagaaggtcgcgggcacgcatgtcttcgccggctccatcaaccagtccggtgcgctcgaagtctcagccgaacggattggccgcgacaccagctacggcaagatcatcgaggcagtcgagcgggcggaaaagtcgcgcgcgccggtgcagcggctcgccgaccgcctagccggctacctcgtctattttgcactcggcgccgctgtgctgaccttccttctaacacgcgacatctattccacgatctcggtcattatcgtcgccggcgcctgcggcatcgctgccggtacgccgcttgcgatcctcggcggcatcggtcgctcggccaggctcggcgcgatcgtcaagggcggtgtgcatctggagacattgggtcaggtcgacaccgtcgtgctcgacaagaccggcacgctgaccttcggtcgcccggaggtgcagcaggtggtgcccgtcgccggcagaacggaagacgaactgctcgatgcagcggcaacggccgagctgcgctccgagcacccgctcggcaaggccattcttgcctacgcccaccagcagggccgcgagatcaccgagccgaccagcttcggctacatgccggggcgcggcatcaccgcaaaggccgataatatcgtgatcctcgtcggcaatcgtgcctggatggcggataatggcatcgggaacgtcggcgaggcggagacacccagccatgccagcggcggcgcgggaacggagatcctcgttgcccgtgacggcattctcctcggcagcatcgtcgttgcggatacagtccggccggaagccaggaatgctatcgcgtccctgcagcgcatgggcattcggaccattctgctgacgggtgacgccgagtgcgtggcgagcgctgtcggcggggctctcggcatcagggagatcgaagcggaattgctgccggaggacaagttgaaacgcatcgatgccctcgtggcgcagaagcgtgtcgtcgctatggtcggcgacggcgtcaacgacgctccggcgctggctcgggccaatgtcggtgtcgccatggggtccggcacggacgtggcgcaggagagcgccgacgtggtgctgctcggaaacgaccttgaacgcttcgtcgaaacgcttgccgtcgcgcgacggacgcgcggaatcatctggcagaacttcgccggcacgatcggcgtcgacacactcggcatcgtgctcgctgccttcggcttcctcaacccgctgctcgccgccgcgatccatgtcgtctcggaactggtcttcatcctcaattcggcacgactgctaccggcccgtgccaacgggggcgctgagaaccggacggcagcctccgtgatcggcgatggcgacgctgccggcggacaggcggtgacaaatgcgtgagagttatggtgtcgtcggccttgtgaattggggcgcgaagctgatggagtcaacatgcgcccagccctgttagaaccgctgcttgatcgaacctatcgccgcctctttgcggcgcaggcgctatcccttgtcgggaccggcttgacgacggttgcgctggcgcttctcgcctacgatctcgccggcaaggatgccggcgcggtgcttggcacggcgctggcgctcaagatggtcgcctatgtcggcatcgcacccctggtcggcgcgatcgcccaccggctgccacgccggagctttcttgtcgctctcgacctcgtgcgcgccggcatcgttctgttcctgcccttcgtgaccgcgatctggcagatctacgtgctgatcttcgttctgcagtcgtgttcggctgccttcacgccgaccttccaggcaacgatccccgatgtgttgactgacgagaagcgctacaccgaggcgctgtcgctctcgcggcttgcctatgatctggaggcgctgctttctccgacgctcgctgccgcgttgctcacgatcaccagctatagcacgctgtttgtcggtgacgccgtgaccttcctcgtctcggccggcctggtgctatcgactgtattgccggcggcaaagccggtcgagcgcaccggcggcatctggtcgaagacgtcctacgggatgcggctctatctggcgacgccgcgcctgcgtgggttgttggcgctcaatcttgccgtggccgcagcaggtgcgatggtgatcgtcaataccgtcgtctatgtccgcagcattctcggcggcgataatagcgcggtagcctggctgatggccgcttccggcggcggatcgatgctcgcggcactcctcctgccgcgtgtcctgacatgggtcccggagcgcacggcaatgatcggcggcgcagtactgctcgcgctcggtctcgcagcggcggcgactttgcccggatttgccattgccgccggtctgtggctgcttctcggcgtcggttcatcgttggtgcagacaccgggcgggcggctcctgcgccgctcctcgcaaagcgaagaccggcctgctctgtttgccgcgcagtttgcgctgtcgcatgcctgctggctgatcacctatccagccgcgggctggctcggcgcgacgttcggcctgacgacggccttcgcggcgatggtcatcacggtcctgattgcctccgcgctcgcattgatgctttggccacgcgtcgatccggtggagatcgctcattcacacgagccgcgtcagcacgatcacctgcatatccatgacgagcatcatcagcatgagcatgagggctgggaaggacccgaaccacatcggcatccgcatcgacacgcgccgattcggcatgtccatgccttcgtcatcgacgaccatcacccggtctggccgcgctcttgatggtgggcgaggccggagcgaggtgtcgccttagacctctttgcctttcccaaatcatctggagcgaggtgctctcacgatccgtggtatgaccggcatccaatccacggagattgcactgttggttgggctgacctaacggcttgtcacggtcccgttttggtctatgccatcgaggacagccaataatcggtcgagatcccgctgaaggatggcccgctggagatgtggtaaacgcttctccttcaacaggttcctggcttcatcggcggaccgcgcccaagctggccgatgtttggcggtgatgcaggcgtttggacagagggtcggctggcaaagcgcggtcagcggacctttggcattggtggcctgcttcagacaggcggcggtgccgggatcgaagaagcaatcggccagcaccccgacatgcagtgtccgcgcgaggcttgcgagcattgtgcggagccgggcacgatcggcgatcatggcggggagtggcccgatcccggttgagatgccgtcgagcgtcttcgatatacgcatcgctgcgggtccggacagcgatgctccggcctgtcgttcgtcgaagtaggtcagtagatcatcgagctggccgagattgcgctggttctcgacttcggcgcgaaagccggatcggctggagccggcataaccttcaaaagcggcgacggaggcatgtttgtactggatcatgccggcgatggtgccgaaaggccggttggcgatgtgccatgcgatcgtgcgtctgaactgccgcgtcgtgatccgccagggctgatcacctggaccattcgggactgccggttcgtccggtgtgccgaaaaggatgttgatgtggtcgcggaagtggttgagctggcgtacgatctcggccgagaggtgatccttgcagacggatttggcggcgagcactggccaaagcgtcgtcagcccacgcgcagatgccgcccgaaacgacaggcgttccagaacctcgacggccttggctacgggctcgatggtgatccaatcgaccggctcaccctggctcgatttgcccttgtaagcgactgaccgcacgcgatgacgcatgatcatgccgtcttcgctgcgcgccaaggaaagacacccgcgttgcatcgcctggacctcgcagtcccgcatgccggtcagataggcacaaaggatataggctgccgattgcagcattctctcttcctgagcaagggctttgacgtcgaagcggtcgcgccagggcttgccggtctcgggcaggatggaaattggcgtatccattccgcccgcttccacgccaagttcgtgcaccgcggccctgatctggcgaggcgcaccattggtcagttgaatgtgcatcttcggctcggccagggcgtcgatgccgatgtgcaaatgaagcagatgcgagttgaccggcggcaatacagccccggtcttcggatgccgcaaaaacgtgccgttgtgcgcggtcgcccagattggaaccccacgaccttcgctgcgaagacgatcgaagtggtcctcaaggcgcttgcggtgtcgttctcgacgatgcttacgctcaagaacgcgatcggcgtcaatcagggcggcgcagctcgcttcgagacggtccatctcctcgcgtgcagcgaagatgtcggaagagaactcggtgacataccggatcgaccaggccaacaggggcgatatgatcgcttcgggaatgcgcggcgtccgattctcggggacgtggcggtagccagcgacgcgagttggtgcgcgtccggcccacggcgggaatggcaagccaccggagggaagataatctcgataggcatagagatcggatgggacttccaacagatgagcgacgatgatgggccggcgggtgcgatcagccttgagatcgcgggcgtaccggtccagaagcccctggtcgacctgccgaagatcgacggcaccaaggtcatcacgcacgaactcgaagaagcgtcgtgcgcggttgaagacctgccggacgctgccgggaggcagtctcttgcggtgccccggcagatcgacattcagccgggcatagaggagttcgcgcaacgcctctcggacacccacatcctcgaccgacccgaaatgcacggtaacgtgacaacgccgggcgttctcccggaacacggctggtccgagatcccagctcggatcgccgtagcgcgacagtgcgtcccggtcgaaccccggctttagcggagcggttgcgagaaccgggcggagatcgagttgtccggaggtggaagctgctggcgccggtctcatcattgccgagcctccggcggcagatagaggtcatgctcctccgcctcgcgacgggctgcggtaatcacactctcggagaaagcagggagaatctgcccggtaatacgaccatgggcgcggccgaacttcatggtccagtcggcggcagacaggcccgcccgctgctcttcgataaaccgctggaatgcgataatcgccggcagcttgcgtgcggtgatgaccgcattgcggcattcgaggcagccccagaagggttgcggacaaggcgtcccggcttccccgaaggggctgcggtcaaatcctgagcatgccgccagccaaacatcctgttcgccgtccagaagagcgtcaacatcattctcctcttcggaaacgcccttgctcaggcgccatgaatcctcgtcgtcaggcgccaatacgatcgggccggcagccgcggcgacttcagaaaatgcctcggcaacggtggcttcgtgcagcggtcgcagcgaggggatatccgcgtagtggcgcgcggcgatctccgtggtatgaccgacggcgaaacgcgccatatgaccctcggtcttcagataccagagcgctttgtgggtcttgcgcaatcgagaaagcacgaggcgaagaggttcaccatcatcatcaacaatgcggtggctgccggtccatcggtcaacgagttgatgtggatgctcgatacccgctcggagctgcttccgcccggtatagtaatagagccaaaggcaattgctcgaaacaaactgcctcgtgaaggccgtgacttcgatcagcttgcggacaagaccacccggcgtcccgatcccgccatcacgaacgcgaatatgtttgtgctcggcaccacgggcacgtcgcttgatataggcgatctcgatggttcccggcccagggttctggagacaatcgattgtcaacgccttgcagcattcgatctccaggccggtctccagggaaaggaaggtcaggaggggtgggatgtcgaaggcccgcagatgaaagcgcgcgtgtagatcctcagccagggtcgagacaggtaacccacggcgcaaacgcatgaaatagagccgtttgaaggcgggatcggaatagctgatccggccctgagacgcgatcctggcttcgacatctgcagttgcactttgaagattggcgtcatctgcttcgtcgagcggcttgccgatccgtctgaaaatcttcgcgatgtcggctcgggcggcatcgcgaagctgccttgcaacgaaaggactgtaggcgtcacgcggccgcgagcgcccgacggatcgtgcaatggtgtaggccaggcgacgacggacactttcgtcgagaagaccaggttgatcggcgtcgatcgagcgcaaggcgaggatcgccttggcgagaacggtatgccgatggataggcttcatcccgctgacttcgagaaaggcttcgtatccgtcgatgtcgtcagcgcgtagaccggcgggcgtctttgccctggaatgctcgcgcagatacgcgaaaaacttcagatagccctgcaagtgctgtttgatcgtgctccgcgcacccaacgagccaccaatccccgactgccgacgaagagcacctgcgaacgcaatggcgagctgtcgcggatgcacatcgacaaggtcaacttccacagtcccgccgtagcgcgcctcgatgttgaagcgcagaccgagcaccggatcgctcgcgtgcacatgcgcgataccatcggcgggctcgaaacggactgaagtacctttgcgcggccgccccgtcatagcgaagcctccgagggaagcagcgtcaggagttcctcgacggccgcatcgacggtgtcggcgcgcgtcgcgatatggtcgaggtagatgtaggtcgtcgtcaggctggcatggccgagaagccgttgcacctgctggagaggatcgccgagaatctgccggtatccctccatcggcccggcaggcagcgcagcatcgcggatgcggtgctgaatgagcatcgcaagcatgtgaacggcaaaggtatgtcggagttggtggggggttatgctgatatcgaaaccgaaggacctgcatcggctggaggcacgcgcgaagacgacttcccaggagttcggctgcactggcaagccgatctccgagagccataacaccgccggttcaaccggcgtaccatcgcagtcgcagacaatgatccgactgcgttcctcgggatcgagcaggtcaagcgcaatatcgccgccgtcaagcaatgacagccggtcaccgcgccgttcttgatgaacgaagatcggtctatcgatcgactgccaccctgaacgccgctggaacttcgcgaccgcatgggcacgttcgacatcgacataggcccgcacctgttcgagcagtcgagcgggaacaaggatcttgcggccgcgatcacccttggtctgggcatcgggcaaatccagccagacctgacgggccgaacgctgatcgccgaaaacgagatcggaggtgaagagagatgacgcttcttccagcctcagcccagtggttactaggagatcggagaacaacgcattgcgaataccgttgcgatctcgggcgccggggcgcgtgcggccgtcaggaaggagccctctaagcccgatatcccgaaacctccgatagtcgtcgagcgtgacgaagctgacatctgccctgcgcgcggcgggctcataggcatcgttccgcgctgccacctgcgaccgccgcccagcgtgcccctgccgccagaccgagcgatgcgtgaagggtgcttccgcaaccagtccttcctgcataccccagcgatatagtcgatcgaggcaggcgaccgcgcgattccaggaagcagcggagatacgttgtccggcgtcggcgcggcggcggatgcgatgataggcaaggacatcatgccggtcagcttgccatatcgtctttgcgcaggcttctgaaagaaaacgagcccagacaagaaggtcatagccataggcacgaagggaatggcgggagcgaacgccgttgagaggaaggtcgcggaaaaagcgatccaggtgaggatcgtatagcgccccatcccggaggatcatggggacataggcatcaaggccttccgctgatctgcgctcctgaatggtgatgcttgaagctgcgattaaattgtccacaagttgttcaaccttcccccggccccccatccggggagccagcatcaacgaaggagttcaacttgcccggcgctatccaggccggcctccgccagctatatgggagcgctgcggccggcctggataacgcctccgtcagtcctgttgcatcgacatccgcaggacactgggaatcggtgcagactgtcaagataaggcaatgagttcttcgcgggcgcggtccgtccggtccttggaatagcgcgaaagatctcgtccgacgcgatgttccgccgccgtccagtgggttttatgccgatatcggcataa

SEQ ID NO: 50 - DNA, 17769 bp, Rhizobium matallidurans
  source 1..17769: mol_type = genomic DNA
ttctactcggtgtcgctaaaattggtgcggcaatcatggagggacttaatgagtgcacccaagcttctgtccggcggcaatccgcagataccgaagggggaaggggatgccccggttcaggcatatattgccgcgatgccggggtggaagagcgcggttgggaagcagatcgaccagctcataacaggtctcgtccccgatgtgcgcaaggccatcaagtggaacacgccgctttacggcgtggcaggcgacggctggttcctggcatttcactgcttcgatcgatacatcaaggtaacgttcttcaagggcgcatcgttggttccgttgccgcctgtcgggtccagacaggacggggtgcggtatgtgcatctgcatgaagatgagcagttcgatgcagccttgctgaagggttggatattgcaggcggtgcagctgccggggcaggttttgtgaggttggcggtaacccaccccatcgattcccgcatggctgggttgaattcccggtggttgtggttggtgccgggcgcgcccatatgtgagctgtcaatcatatgctagagaaagaaagacaatgtccttccgccagtccattcgtgatggctttcttggtcgcgcctttgcgatgatcggtgccgccaatgccgccagcgccgccgtcgaatccggccgccgcccccgcgcgcgcgatctgaagaagctcgggatcgatccgggccagttcgaccgcatcaatcactaagcttgcgacataaagcgtgtcgcgatccgcaggattcgctcgtcacgctttaagtctttgttttgtcgcacgtcgctgccgcaaaacagctgtacattcttgcgcgacatgcttggaagcggtcctcgaccgctcgacatgaatgagcccgccacccggtgaagtgaccgaggtcgcgggctttatttttgtcgaaagttttgttctgccgaagatcgggccaccgcggctgccgcggcccgatcttcacgtcgaacgttgcctcaggtctggacctgcggctcctgcttcttgtgggcgtgcgtttcgccgcgcgcgcgctcttcggccacttcccgcctgttgtggcggatggaggaccagagcgagaggccgatcagcgtcgcgccgccgaggccggtgatgacttccggaacgcgaaccatcgtctgcgcatacatgaccaccgagaggatcaggatggcgtagaaggcgccgtgctcgagatagcggtattcggccagcgttcccttttccaccagcatgatcgtcatcgagcgcacatacatggcgccgatgccgagaccgatggcgatgatgaagaggttctgcgtcagcgcgaaggcgccgatgacgccatcgaaggagaagctggcatccagtacctcgagatagatgaaggcgccgacgccacccttggcagccgcgttcatcgtcttttgcgaggcatccagcaggccgccgaccacttcgaccgcgaggaaggtcaggagaccatagatggcgctttcaacgaagctgctcgcctcttcttccggcaggaaggaggagaagatcaggatcagcgaaagcacgaaggcgatctcgatgcccttgatggtggccgagcgcgacatcagtctttccaggccggcgatccagtgtacgtccttctcgtggttgaagaagtagctgaggccgaccatcatcaggaaggtgccgccgaaggccgcgatcggcagatgcgcgtcgttcatgatgcgggcatattcgtccggttcgcgggcggccagaaccacggcttcccatgggccgatctgcgcggcgatggcgacgatcgccagcgggaagacgatacgcatgccgaagacggcgatgatgatgccccaggtcagaaagcgatgctgccattccggcgtcatctccttcagcttgttggcgttgacgatggcattgtcgaaggagagcgagatctccagcacggcaagcaccgtgcagatgaagaagacggtcgccatgccgccgagggtgccggtggtctgccagccgagggccgcgccaagcgccaggccggcggccgtgacgatgaaggaccaggtgaagtagctgagggtcgatctcgacgtggtgggggcgctcatgagcgaacctccacgccggaaacggtgttcgggagcgcaaatacgctcttgagcatcgaaatgctcgtgagcatggatatgctcgggaaacgcgacatgccacaacgggcatgcgcgtaaggcatggtgtgctttttcatagaatgaaaatccgccggctcatttgcaggcggtaccgacatcacgagagcgccgtaaaaactctcgccagaggggcccggcaccaggttgcccgtcggccgatgtctgaggccgcgggatgctcacagagataatcaacttcaggcgtcagtcaagatcaccttgcgggttcgtgtcgcttttcccgggaaccatccgatcgctcgatcgttagcttaccgattacccgacaaatgtgtcgctgatgggctgtcgaccttggtcgcggcacgctcgatacgcggtcgggaaccgaaccagtgcctatcgaaaaagtgccatcgaaacagtgtcagccgaacatgtgccggttgaaagaagggagaggacgaccatgcagaacttcagccacgttccggaaacccatattcccgacaagcgcacggaagcgccggaccgcatgaagcgggctaagccgaaccggatgaagacggcccaggttatgccgccgcaccaggtggacctgacgctgacgccgggggttcatcacgacatccatgtgcccgcgcatgtgacgggcggagacctgtcgcgcgaggggccgatcaccagcgacggtgaaaagggtgcagacaagagcgccaagaagaactgaattcaagccgatagcgaggacacatgaccgtaaacaccgtacccgtcgacctctccatgaagcacgagagcgagtggcgggcgatcagggcagtcgccacgcgcggcggcgacatcatgacagccggctcccgtcagaacccgatcgtttcttcgaaggcgtcccaggagcgggtaagttcgtagcggccgatgccggggatggcgaagtggccgaaataggggctgagctggaattcggcgaaggcctcgctgaacttgccgacggcgccgacatagatcgccgcggcaaggccggtgcggttggcgccgtgttcgcaatggatgagcagcggcttgggcgcatcggccatcagcctggcaaggcgctgggcctccggaaccggcaggacttgcgacgaggacatggggaaatcaatcagcgtgatgccggccttggcggcggccgcggcctcctggcggtaccagccggtgcgctcctcgtcgcgcagattgacgatcgtcttgataccgtaggtatcggcataggtggcgatgtccgagccggtcggctgggccgagcggtagagttcgccgggtatgacttcgtgaaaatttccggtgagctggcggatgcccgcatggccgacgaccagcaggaccgcgcccagcgcaaggccgacggaccatttcagaactgcaagatatcttcgcgccatgccttcacttccaggcagccttcatggctgtcgcatcactgcgattgcggtgatcgggcatgacatggggtgcttggcaaggccatgccagcctcttcaacgaaacgtgagcggatggctccggccgagaaatgccgcgtggacgtggcggtcgcatgggcgaaaacttgctggtggcaaacggcgcttgccaacctttcggaaaggattgagcggcgataatcggccatcacgggatttgggacatcatggccaagacagcgacacgccgcaagacatcgacacgctcgcgggcgggagcgagaaaaagcggaggcggcagcgcggttccctgggtggtcgccggtgtgctcgcctttggcggcatcgccgtctacgacaactggaagagcgtgaagccgatgctggcgtcgacggcgcccgcggcatcgatcgcgaggccggtcagcgtggccaagagcgcgccacagcgcgagagcgacaacagccgcgataccgggccgaggcagaccgcgtcgatttcgtcgatctcgaggatggtgccgccggccgccgtgccattgccgtccaggggcccatcatccaataatcccgcggccgaaaaggcggtgccggtttccgtttccccggtttccgtttctccggcgcagacgcaggccgccaaggccgcgttcggctattgcgggcagggcgagcatgtcaactgcgtcgccgacggcagcaccttctggtacaagggcgagaagatcgtgatcgccgatatcgtcagccccggcatcgacaatgcgcgctgcgacggcgagcgccgcgccggcttcgccgccaagctcaggctgctcaatctactgaacgccggctcgttttcgatgaacgccgccggccagcccgacaagggcgccgcaccccgggtcatctcgcgcgacggccgctcgctcggcgcgcaactggtcgacgagggcctggcgcgcaagcccggccaaggcgcctggtgcgcctgagggcgcttgaagctacttctgcttcggcgccttgccgttggtcttgaagagggcggagaaggcggtatcggtgctcttggcggtgcattcgatcgagaccggcttgccgtcgtaggggttgccgagcgtgcagcttcccgacaccttgacctgaccggtcatcttctggccgacccccgtcaccaccatgtcgagcggcagggtgacattgcctgacgatgccggcttgatcttggtgccgtcgccctggaagccgagcatcttgccctcggcgctgaagatcaaggtgacctgaccgttgatcagcgtgacgctggcgatctcgttccggcagggcttggacgcgtcgaccttgccgacgacaagcttgctgcatcgtcccgccagcgtcagcgcgcccggcgcgcccggaaaattctgctgcggcgtgcccgcggcctgcgcgatcgttgccgacagaagcacgccggcggtcaggattaccagtttcatttcaatacctcgtcattctccagggcaccgaggccatggcattcttctgtgttcgaaattggtcgacggaccggactttcaaggcgggtgcgtacagcttcgcggcaacgggaaaagccaccagaaatggcttccaacaccacttttacatatatcgatccgataataagaccgtcgccgccccgtgtggggcgcaatgaggggaaacatgagaaacatcacgctgtcggcggtctccgccatcgcattcctggcattttcgggcgtctcttacgcggaagacctggtcttcacgctgaagaacggcaccaactccgtgctcaccaatttctatacctcgcccgtcggcgtcaacgagtgggaggacgatgtcttcggcaggcaggtgctgaacccgggcgagagcatggacatcaccatcgccgacggccgcgacgtctgcaaatacgacatgaggttcgaattcgaggagggctccagcctcgacacgaccaccgatacgcagaacctttgcgaaatgggctcctatacgatcaacgaataggcgccgcgcgaattgcttttggtgacgaggctaggccgatccgccgggcctcttttcgtttgcgcggggcccgacggcaaaacgccccggagaccggggcgatggctgtttcggtggtgtcggcgcaatgcccgacatgcctagcggcagacgcgcaggctttccatgtggtagccgccgtcataggcgttcggcacctggcggtcctcgaaccagcagcgcggcgggggcggcggtggcggatcgatgtagcgcgggccggaattgccgttggcgatggcgccgccgatcaggccgcccagaacgcccgccgcaagaccgccggcgatcacggcgccgtcgttgttgtggcggcggcgcggcggcggcgggggcggccgctggtcgcgatagccgtagcccggcgggcgacggtcgtaatactgcgccatggccggcgcggtggtcgccaggacgctgctcaacgtggttgtggcaaccacagcgtacagaaccatcttcttcattcgcatgcgtctccgttaagatcgaggggcctgatagccactcaacatgcccagaagatggcattggtgagcttaacggattctgaacgaggcagcggggtggatgagttcgaaacggaggatgctgggcggtctcgcgcgcgaggcagccgaccgccgaaatgaaaaagggctcagcgatttctcgctaagcccctgactattcagtctaatctggatggtgggcgtgacagggattgaacctgtgacccctacgatgtcaacgtagtgctctcccgctgagctacacgcccatccgatgtcggcgcatagaccacaaacctatttggccgtcaataggcctttttcagatttgtgacatgcgcccacagaagccttaggcggcaagcattttgttgacttcgtcgacgaggtcgcggagatggaaaggcttggaaaggaccttggcgtccttcggtgccttcgaatcaggattgagcgcgacggccgcgaagccggtgatgaacatcaccttgaggtcgggatcgagttcggtggcgcggcgcgccagctcgatgccgtccatttcgggcatgacgatgtcggtgagaagaagcgaaaagggttcctcgcgaaggcggtcgtatgcgctggcgccgttgtcgtaggacaggaccttgtagcctgccttttcgagcgccttcacaaggaagcggcgcatgtcgttgtcgtcttctgcaagaagtatcttctgagtcattatccagaccgctgatcagtggaatttatgcgtgagtattggtcatttacactagatttcggccggtaaacaaccggtgaagcgcctgtgcaaagcgtcatccccatgagatagtatggacttggcggccttcaactggcaacatgggcaaagcaggtgcctgcgagcatggttaagagggaaacaggtggacgagattcccgcgtacgagctttttgagatacgggaacccgcgtcgcacaccattccattcgtctacaattcccctcatagcggccgcatctatccgcccgagttcatcgcgcaatcgagattgcaggggatttcgatccgccgctcggaagaccactatgtcgacgagctgttttcggcggcgggcgcgctcggggcgccgctgctgctcgccaattttccgcgcgcctatctcgacgtcaatcgcgagccctacgagctcgacccgcgcatgttcgacgggctcttgccttcttacgccaatatcaactcgctgcgcgtggccggcgggctcggcaccattccgcgcatcgtcgccgagaacatggagatctacgcccgccgcctgccggtgcaggaggcgctcgatcgcgtcgaggcggtctacaagccctatcacgcggcgctgcggcggctgatcgcgcgcacgcatgtgcagttcggcttcggcgtcttgatcgactgccactcgatgccgggcaatatccgcgtcgccggtgcgacctcgcggccggatttcatcatcggcgaccgctacggcaccagcgcctcggccgagctgtcgcgcatggccgtcagcatcttcgaggagatgggcttcgcggcgatccgcaacaagccctatgccggcggcttcatcaccgagcattacggccgcccgtcgcgcggcctgcacgcgctgcagatcgagatcaaccggtcgctctatgtcgacgaggtgacgcttgagcggcgcgccgatttcccgctcgtcgtggcggcgatcacctcgttcatgcgacagatggccgactacgtcgccaagttcgccggcgacacggcgctggcggcggaatagggcggcttcgagcgcgctctcgatcgccgtatttcaacgcattattgctgtcgtgaagttgcgatagattgcctgatgcggcggtcgtttcttgtagctcctgggccgcaacggttccgtcctgtttccacccgacaaaaaaagaccgccttgcggcggtccaagtctagggaggaaacacccaaggagggtatttacagtcagaagactgtagggagacgctactattgcagtgcacaattgtcaatcagtttattgcggtgcgcaaaatatgggcagccggctaaaaattgctgcctgcgtttgcaaaatgaccggtttcggctatggaaagcggcatcgacggtctcacacggatgtccctcatgtttcctgatcgcaccttcttcaatcgtctcgcggaagccgccaaggccgagacgctgccgcggtttcgctccgggatcgacgtgaccaacaagctggcctcggggttcgatcccgtcaccgagggcgaccgggcggccgaagcggcgatccgggcgttgatcgaggcgcattttcccgagcacggcattctcggcgaggagtttggcaatgtcgggctcgagcgcgagcatgtctgggtgatcgatccgatcgacggcacgcgggcgttcatctcgggagttcccgtctgggggacgctgatcggcctctacaggaatggccaggcggtcatggggatgatcgagcagccgtttaccggcgagcgctatttcgccgacgagagcggctcctactataccggtccagagggcgagcggcggctcaaggtgcgcgattgcgccgggctttccgatgcgatcctgttcacgacctcgccgcatctgtttgccggtaccgagatggaccggtatcgcgagatcgaaggccaggtgcggctcttccgctacggcaccgactgctacgcctatgcgcttctggccgccgggcacatcgatctcgtcatcgagaacagcctcaagccctacgacgtcggcggcatcattccagtcatcgagaaggctggcggcatcatcaccacctgggacggcgggcggccggagaatggcggctcgatcatcgccgcaggtagccaggcggtctatgacgcggcggtggcgatcctgcggcgttaaaccggtggttgctttcattccggcaaaatgaagcccagttttgtcagattcgcacagtgttcagcatcaaaagttgctttcacatatccgtatctctccttggttgttttcttcacgaaaacgtgcctctacttgcgcgataagatgcgcgcactgggcgaacattaatcaaacagaaagagttcgctgcaaatcttgctgatgaagtgaatatttctacggaattttgccttccggtgatccgtatttcagttttgaggcaaatataatgcagcttttttctttcgggtccgccgccggcgccaaggccgttcttgatgcggtcagccgctcgcaggcggtgatcgagttcgacatggctggcaatatcctgtccgccaacgagaacttctgtcaggcgatgggatatcgtctcgacgagatcgtcggacggccgcacagcatgttcgtggaaccggaagaagcgaagagcgcggactatgccgctttctggaagcagctgaacaagggcgaattcgaccgccggcaatacaagcggattggcaagggcgggcgtgaagtgtggatcgaagcctcctacaatcccgtcttcaagggcggcgcgccctacaaggtcgtgaagttcgcgaccgtgatcaccgacacgaagctgaagagcgccgaagacgcgggcaagctcgacgcgctgtcacgcgcgcaggcgacgattgagttcacgcccgacggtcatatcctgacggccaacgagaatttcctgacgacgctcggttatacgctggaggaaattcgcggacggcatcactcgatgttctgcgaccccgcctatgcagacagcggcgagtacaaggaattctggcgcaaactcgcggccgggcagttcgccgccgacgagttcgcgcgcatcggcaatggcggccggaaggtgttcatccaggcctcctataatccgatttttgacatgaacggcaaggtgttcaaggtcgtcaagttcgcaagcgacgtcagcgagcgggtcagggccgtcaacgagctcgccgtcggcctgcaggcgatggccgagggcgatctggaccagacgatcgaaaagccgttcatcgcctcgctggaaacgctgcgcaccgactacaactcctcgatcggccggctgcgggcggcgatgcaggcgatcgccaggaacgcgacgcagatcgcatcgggaacgcgcgagatcagtgccgcgtccgacgaccttgcccgccgctccgaatcgcaggcctcttccgtcgaggagaccgccgcggccgtcaccgagatttccacgaccgtgtcggattcggcgcgccgcgcggccgatgccggacggctggtcgacgacacgacgaagagcgcgcaggattccgccgatgtcgtgcggcagaccgtcgaggcgatggcgcggatcgagcgctcgtcgacacagatcgccggcatcgtcagcgtcatcgacgatatcgccttccagaccaacctcttggcgctgaacgccggcgtcgaggccgcgcgcgccggtgaagccggcaagggtttcgcggtcgtggcacaggaggtgcgccagctggcgcagcgctccgccgatgcggcaaaggagatcaaggcgctgatccgcgattcggaagcgtcggttcgcgacggggtcacgctcgtcgacaagacgggttccgcgctcgaggcgatcgcggcgcgggtgctgcaggtgcacgacaacgtctccggcatcgtggtggcggcgcgcgagcaatcgcaggcgcttggccagatcaacgaggcggtgatgtcgatggatcaggacacgcagcgcaacgcggcgatggtcgagcagaccgcgacggcgagccgcaagctggcgacggaggcgagcgcgctgttcgacctcatcggccagttcaaggttggcgacgagcgacgcgaacgcgtgacggcgccgttgtcgagagtggcctgacaatcgtccgacaactgtccggcgggcgccggacagttgcgagatcgcgtgtcggtgatgacacgccatcgctccgaggactggcagggcgaacagcctgacaagatgaagacatgaaaaaagggttccgccgacaggctggaaccctttttcgttcgatggcactgcttgcggcggcggcgatcagccgccgatgccgccacgcatgcgggccatatcaaaggccgccgggcgcggcgtggggacggcgaccgccgtcgggatggtgtaggcaacggcctcgaaggcggccggctcgggcaccgacggcacgtaagcctgctgaaccggaacctgcagcacctgcttctgctggatctgaggctgcttagactgggtctgttgcagctggggctgctgcatccgcacctgatcggcggtcgtctgcatcggcgctgcctgcggcacgggcacgttatcaggcgcttcgtaggcggtatcgacaacgccgtccgccatcgggatcggcgcgcgggccggcgaggcggcgggcgtgagcagttcgaactgcgccgccatctgattgtgttccggcacgaaattcatcgcgacttcataggcgggcagcggtgcaggggtctgcagctcgccgtcggcgccgcgcttctcgtagaacgaattgccgccggcaaccgtcacgtaatacatgttgtcgtaggggaacttcaggccgcttgtgtggaagaacatggccttcttgacggcggggttgcgttcacccttcaaaagcgcgtcggcggcctcgttcagatcgggctccgcctggggcttgacctcgcgggtcatgacgccgggagcgaactgtctggcctgcgaaacgacgccgcaaatggacttggggtaggccggcgatgtcagccggttcagcacgacgctgccgaccgccatatagccgtcgcgatccgactgccgcgattcgaaatacattgcccgcttgagacaggtgcggtcttccgtcgtgtaattgtaggtgaccttgccgggtgtgctggtctgcagcggctttgtggtctggatgctgccggtcgtcttcggcgtgctcgtgcaccccgtggtcgccaagcccacaatcatgatcccgaaaagagatcgtcccaatacgtaatgcgccctcaacgccaggtgccccctatgtgattagttcagcccttatcgaaaaagtgagtaactattatcttacaatcgtaaaaattcaaacaccgcgttacatttttgtctcaaaatgtgatcgggctcgggtcgagccatgcgatattgggcgcgcgaggcgagggaacggcccgaccggggacgcatcgcgttcaggtgccgaagccctcgaactcctcggaaacctcggcatcggcgcccggaatgaaggcgtggaaggcggcgagcgccgcctgccggtagacatcgcgttcctgcaacacttcgtgacgggcgccgttgatcggcaccagctggccggcccggaaatagcgcgaaaggcgctcctgggcgatgtagggcacgatcgtatcgcgcgtcggcgcgatgaccaccgtgggaatggtgatcgaaaacagatggttcggcgcggtgacgcgttctatggtcttgaaggattccaaaagccagcgggccgtgggcggtccgagcgtcaggtcgggctgggcctcgccgatcgcgacattgcgttcgaagcgcacctcgtccgatgtcagcggattgtcgcggaacggcttttccttgagcctgcgcgccagcgggtacgagccgaggccgagcacgcaggccatggtggcgagccgccggatggtgccggccgaggcgggctggccggcgaggccgataaagggcgccgtcagcaccatgcgctcgatgcgggtcgtgagatagggggcagccgacagcgcgatcagcgcgccggtcgaatgcgccagtatatagaagggcaggcgggtatcgggcagcacgaccttctcgaggaaggtgtcgaggtcgtgctcgtaatcgatgaagcggcggacatggccgtaatgccgcttcttcagcatgcggtcggaattgccctggccacgcagatcgaaggtggcgacccagaggcccttgtcggtgaggtcgcggatcgtctcgtaatatttctcgatgaattcgttgcgcccgtggagcagcacgacggtgcccttggcgacggaggccgaggagcggaagacggcgtagcgcagcttcaggccgtcatgcgtctcgaagaagccttcggtacggttttccggaaccggattgccgggtgtcgaatagagaacctggtccatggccgtgcgcgcgcgtccttcgaaaggattcgggattgaagtaaagcggataggcgatcggcctgtcaaatcaaagaaaaaagcgtcgccccgagactgtgccgccatcatgcaaaaaaagtggccggcatgcgggacctgaggggagcgcaatgccggccggagatcgggctggagacgaagggacgatacactccagccatcgagccagtgtaacccgatgacgcaatctgtaggcccacacgtctgaacggatgccgaaccgggtgttcatgcgcggttcacggtggctggccgcggatttccggtggttgtgggcggctcttcgaaagggtcttgaagtccgaaaaagccatccccatctcatggtagcggacgccagaacgggtccgcggaaccgtcccgaagctgccgatcaaggggtttcaggggcaacttatcgcaaccagtcgcttcctcaggaggacatcatgcgtcacgtagacttctctcccctctatcgttccaccgtcggtttcgaccgtctcttcaccatgctcgacagcctgggccagcccgaccagggccagacttatccgccctacaatatcgagcgcaccggtgaaaacacctaccgcatcaccatggccgtcgccggtttcgacgaaaccgaaatttcgatcgaagcgcaggcccatgctctcaccgtcaagggcgagaagagcgaggacaatgcggaaggctccgaattcctctatcgcggcatcgccaagcgcactttcgagcgtcgcttccagcttgccgaccatgtcgaggtgacagccgcttctctgaagaacggcctgcttcacatcgaccttctgcgcagcattcccgaagcgatgaagccgcgcaagatcgcgatcgccgccgagccggtgagcgcgccgaaggcgatcgaggctcaggtcaccaactaaccaatccctcccaggatatggcaaagaggcggcgctccggacggggcgccgctttttcgttgtccggcgttcgatcacgccgaccggtcacgccgggttggcggcttgctcgatctcggcggcggtggcgcggcggtggtgggcggcggcgtatttctgggcgatgacggcgcagaccatcagctggatctggtggaagagcatcagcggcaggacgatggcgccgatcggctggccggcgaagatgacgttggccatgggaacgccgctcgccaggctcttcttcgagccgcagaaggtgatggtgatctggtcggcctcgttgaagccgagcaggcggctgccgaaggtggtggcgcagagaacgatggccagcagaacgatgtcggcgacgatgacgacggcgatgtccgtcagcgagaaggtccgccacaggccctcgaccacggcggtcgagaaggcgaggtagacgaccatcaggatcgagccgcggtcgacgggcatcaggagcttcttcttggcgcggatccagtcgccgatccagggctgcagcgcctggccgaggatgaaggggagcagcagctgcgtgaagatctgcaacagggcgttccaggagaagccgccgtggccgccaaccgagaaaagcaggccgacgagaagcggcgtcaggaacatgccgaagatattggaggccgaggccgagcagatcgcggcgggcacattgccgccggccatcgaggtgaaggcgatcgacgactgcaccgtcgacggcagaacgcagagaaagagaatgccaagatagagcgggcgcggcaggatcgaatccggcacgaggccgagcgtcatgccgagcagcgggaagatggcgaaggtggtgagcaggatcaccagatgcagccgccagtgcagcaggccggcgatgacgacatcgcgcgccaggcgcgcgccatgcaggaagaagaggagcgcgatggcaagcgtcgtcgccgtgccgaaatagcccgcgaaggcgccgctggccggaaggatcgaggccaggatgacggtgcagaccagaaggatggtgaaggtatcgggcaggaaacggcgcatgggctgaactcggcttatccggcgggtcgaccggcttgggatggatcaatcctgtttcttccattatgatatgcgatgcaagaaataacagttatcgcgaaatgagataagcatgcttgatcttacgcaattgcgcagcttcgtcgccgtcgagcagatggggagcttcacgctggcggccgagcggcttgggctcgggcaatccacggtcagccagcacatccagcggctggagacgtcgatcgggcggcggctgctggcccgtgacacgcataaggtggtgctgacgacggatggggaggccttgctgtcgcatgcgcgcgccatgctctcgatcgaggggcaggtgcaatcgctgttcggcgggccaagcctgcgcggcaagctgcggctcggagtgtcggaggatttcgtcaccagccagctgcccggcgtgctcgaggatttcgtgcgctcgcacccctcggtcgatctggagctgacggtggcgctgtcgggcacgctttacgagatgcaggacaatggcgagatcgatctggtgctggccaagcggcggctcggcgacgcgcgcgggcggctggtctatcgcgagccgctggtctggctggcgcgcgatcccgatcatatcatgagcgccgcgccactgccgctgatcgcctttccgccgccgagcgtgacgcgggcgatttcgctggaggcgctggggcggcaccggattccctggcggatcgtctgcacctgcggcagcctcagcgggctgacggcggcggcgcgcgccggcatgggcgtactcgtgcagccgcgcagcatggcgccgtcggggctgaaggtgatcgcgaagggcaagcttcccgtgctcgaggatgtagagttcgtgctggtgccgcgcaagggtgcggaccaggcgctggtttcggcgctgtcggacgatattctcgccaaggtcaggagcctgcggtcggggtgacgttgctctggcccggatgcccggtcttgcgggcgcgcgtcgtggttaatccgttgtctcgaattttaagtatccttcaaccctgtcgcttaggtttctggttaccttggaccccttagtctggtcgtcgctcaaggtcgacgttcggggctacagggagaacggacgatggtatatggagcgctcttcgtctccgggctggttgcctgcgtgatgctcatcgtcgtggctggtcacgactccaagacggcggataccggggcgccgccctccgccgtgatgctgcgtcagaactagccgcttcggagaaacaatacgacaatgtcgacaatggtgatccgccgcttatggccgcggatcaccattggaacgcgccaccgcagccacggtgacgatcttcgtcgccgttcccatgtccgtctaggatgcgaggcagctcaggaagccgtctacgtccttttcctctgtcgcgaagctggtgacgaggcggatcaggatctcgtcagggccgacgagatcaggcgtggccgacgggatcggccattcgtagaatttcgcgcccttgtcctcggcggtctttccggcgctcttccttataatggcgaaaacttcgtttgaagtcgtcgaccacgcaaggcgggccgagttgctggcgccgatgcctgcgcgcagccggtcggccatgccgttggcgtggcgggcaagctccatccacaggccgttatcgagataagcgtcgaactgggcggcgatgaagcgcgacttcgagaagagctgggcggcgcgcttgcggatgaagggcatttccttcgccttgtcgggattgaagacgacgatcgcctcggcgcaccagcagccgttcttggtgccgccgaaggagaggatgtcgacgccgcgcttccaggtcatctcggccgggctcgcatcgagcgccaccagcgcattggcgaagcgagcgccatccatgtggagcggcagcttgcgctctttgcagatggcggaaatggcgtcgatctcgtcgagcgcgtagacggtgccgatctcggttgcctgggtgatcgtgaccgccgtcgcgcggccgtgatgcacggcgttctcggggtagccggcgatcgccttcgaaagcttcgcgggatcgatcttgcccaattcgccatcgacaggcgacaggcgcgcctggctgaagaaatcgggcgcgccgcattcatcggcgatcacatgggcttcggaatggcagaaggtgatgccgccggggcgctggacgctggcgagcgacagcgaattcgccgccgtgccggtcgccacgaagaagacggagacttcgcgctcgaagatctctgagaagcgcgcctcgacgcggcggtcgagatcgctggtgccgtaagcggcggcgaaaccggcggattcccgcagca

SEQ ID NO: 51 - DNA, 16289 bp, Rhizobium matallidurans
  source 1..16289: mol_type = genomic DNA
acaggactgcagcggataatgccggtataatcgagtgatggtctcccagcccataccgggtttctcgcccacagaaaggccggtgcagaacacagcgcatacattcgctgaagcaaatgtcctttaaggggaggatactgctcagacagctgtgcgtacaccagatcgttgtcgtctgggacattctccccgagttcaacgtgcgaacgagcgcgcggcgcgtagtttggggcagtcgcgtcagaacctcggcggcgacgacgggcctacgctcaaagacattcgtgatgccatcatcgtttttgaatgccgtgcatccgaccgccgtgacaccttcgatcggaaggtcctcgtcgcccaagtcggcgcggcggcgagcttcgcgaaactacggcagaggttcactgtgggatgcgagcggatgtgcgacgtagatggcgacaggtgcgagaccaagtttccttgcctcgacgcggcgcccttgttggcgccgaaggtctcttagctcctaacagggcgcgcgcctcgccccgagccagcctcggtcctttcttacaaagcgaaacctaacgtgctccgcctgggatactattgacgcgggtgaccgcattcaggatcggtggcgcaatgggtcgtttcgtcggcgacgaagaacctgatgggcgcaggatgccgatcaggcgttggtcgatgatggttgcggaccgtcggatcccgcatttcttcgcgacccgtctcatgcaagcccccaactctggtcggctgggcttgcgatctcgtgctacctgcggcggcctccgtcctgcttgtagttttattcggcggcctccacgcgctcggtacgcttctactgtttcgcgcgataaatcgcggcgtagtcatatcctggcactggtgtcagggttcgtcagaacggaacgagcatggctgaggaagtcgatgatcttcccagtctggaaacgcggagccgcgcgggaataaactcgtggttcttgaccacgaccgcccgcgcggcaacaggagttcgtggaacgaaatcgccgctcgcgcattaagatgcgttaccatccaggaatatcgatgacagaacacaataacagtcggcaggacgccagagacgccggtgaccgtcttgtcgctgatcacgcttcggaagacccgttcgccgcagcgttcaaagccacgcgtatgccgatgctgatcaccgatcctcgtcaagcggacaatccgataatcttttgcaacgcagctttctgcaagctcacgggctactccaacgaagagctcattggcaagaactgccgcctccttcagggccccgagaccgatccggacgccgtgtccaggcttcgcgaagccattgctgccgaaaaagatctcgcgatcgacattctcaattaccgaaaagatgggtctcctttctggaacgccctcttcgtcagcccggtccgggatatttctggcacggtgatctacttttttgcctctcaactcgacttcacgaatatcaaaagcaaggaagccgaactcgcgcgcgcgcgtcacctcgccgaggaagaagtggggatgcgaacggcagacctgaccgacgccctgcgtgcaaagacaacgctggtccacgaggtcgatcatagggtcaagaataacctccttacgatcgcatccatcgtaaagctccaggcccggatgaccgaaaacgacattgtcaagcgtacgctgacgtctgttctcaatcgcgttgaagctcttagcaccgtccagcgcaagcttttgaacgacgaggaagtggggcaattcgacgtagccgatttcgcgaacaccctcatgatcgacaagatcggcgcactgaagcgctccgacatacacctgacaacggatctacacgcggttgtggtgcctgctaccaaggcatcgcccttggctctcattatcaacgaactagtcggcgacgcgataagaagaggtctgagcgacggcggtggcgagatccatctggagatcagacggctcaacggacacttccttatccgagtcgtcgatacggtcacgccggttgacgtagacaaagaggaagctgcgttcagccaagccatgctcgaggcgtgcctgaagcagcttcgagcaaaaatcgaccgagttgtgaagggccaccggacagacgttacagtcacgctgtccgttaaggactgaaaggatttgatttgaatattctgattgtggaagatgaagtccttcttgccatggagctggaaagcgaagtggaaggcgccgggcatctcgttgttgggacggcgaccgatagccgtgaggcgatcgagatcattgatgccacctcgccgcaatttgcctttgtcgacattcaattgctggatggcccaacgggtatcgacgtcggacgctacctttcggccaaggccattccattcgtgttcgtatcgggaaatctcaagcgcataccggacgactttgccggtgcgctcggggcgatcgagaagccctacacggttaacggtctgcaaaacgccttgcagtttctgcagatcatcatcgatggcggccatggctcgcaggtcgcgccgcctagcctcgtcctctcccctgccgcgcgcgccaccgttgcggcatgatcaactccgcgatttcgcggtgaaggaaaccagtgagttcaccatcggagcgcatcggcgccgttcggaattcaggtctgcttggcgttcagggccagtccgaatttcaggacattatcgaggtcgtaaaggccgggctggactgtcccgtggcgcttgtctccattcttgacgaggaccggcaggtcttcatcgctcatctcggtctgccggagacatgggccgaggcggcagagaccccgctgacccattccttctgtcaacacgtggtgcgggacaatcagcccttgatcattggcgacgcgacgatccatgatcttgtcagagataacctggccatcacggatctgggcgtgatctcctacatgggcgtcccggtcacaatgccggacggtctggttatcggagcgttggcggcgattgacggtgagcccagaacttggacaagacgagagctcgagctgttgagccgcatcggcaaggttgcctcgaaccagatcgctacgtttctatcagagcgccggtggagttcgcttttcgagcagctcgaggaaggtatcatcgtcggttcggtcgtccgtgacgtcaatggaactattgtcgattggcgacatgacagcgtcaatccggcttggagcaagcttgtggactgtcccgtcgaggacgccaccggtcgtatgatgcgagagatctttccaaattttggagaggagtgggtatcggacgtcgcgctcgttgtcgaaagcggacagagcaggcgttttactcggcacattccctccctcggacgttggttcgacggctacgtgcaggcgacaggggatgacaaattcatcatcatttttgtcgatgtgacagacagaatggaggctgtggaggcccttcgggacagtgagacaaaactgcgcctgatcgtcgagggcgccaaggattatgtgatcgtgaccatcgatcacgaaaagcgtatcacgagctggcttggcggcgcagaggacacctttggctggaccgaagcagagatgcatggacgacggttcgaggagatattcacggaggaggaccgcgcggtcggcgttccagaaactgaaatgcgcaaagctgcagcggaaggcgtggcacttgatcgaaggtggcaccaagcggccgacggaacacgggttttcctagacgggaccatacgaccgtttccaggccattccggtccggaagtaccaggcttcatcaaggtggccagaaacgcgacatctcagaagatcgccgaaaatcggcaattggcattccttgagctcggcgacaagatacgggagctggacgatgtgaaagatgttgcattcgccgcagcggaaatcatggcccgcaacctggagggcgcgacaagagctggttacggggtcatcgatcccatcgtcgagaccgtgcagatgctacccgattggtgcgccgaaggtatctcgactgtcgccggctcgcaccaattccgggattatggctcctatatcgaagatctcaaacgcggcgagacggtcattattccagacgtggccaaggatcctcggacatcggcgtcagccgagcttttccattcgatcgggatttctgtgctggtgaatgtgccaatcatcgagcacggcgccttcgtaggagtcatgttcgttcactacgacagacctcatgatttctcgtcggaggaacgcgacttcgttcggacgatcgcagatcgcacacgagaggcgatttcgaggattcgcgcggagcaggagcagcaggttcttaatcacgagatcagtcaccgactgaagaatacgatggcaatggtccaagcgatagccacgcagacccttcgccctgtcaccgatcgggcgcctgtcgaagcttttacgagccggcttcacgctctttcgaaggcacacgatgttttactcggccaggactggtcgtcggcgcggatgatcgccgtgatcgattccgttctcggtcagctctcattgccagagcgatattctatctcgggtccagacctgcagcttggaccgcgctcggcgctctctctggcgctgctgatgcacgaactcgggaccaacgcgctcaaatatggagcctggtccaacgaagcaggcagtgtcgatgtctcgtggatgatcgaaggagccagtgatgacagtctgcttgttcttgcgtgggacgagcatgaaggccctccagtgaccgccccatctggcaaggggttcggatcgaagctcatacgtctcggcttgacgggaaccggcggtgtcgacgttgattattcccctgatgggctgaaggttaagatgcgcggactgatttcgcagttgaggcagtcgtgatgaccgtgagtaatattgccaaggacgtcgcaatcgttctagtcgttgaagacgagccgctcctgcgtcttgccggcatagacctcatcgaagctgctggatatgaggcggtagcggcgtcggacgcgacagaggcgatcgcgatacttgagtcacgcgatgacatccgtgtagtctttacagatgtcgatatgccgcgcggcgtcgacggaatgcgcctggccgcgatcattcgagacagatggccgccaatcaaggtgatcgtggtctccggccacatcgaggatcccggagacatgatcccggccgagacggtgtttttctccaagccttaccgggaggaacagatcgtggcaaccatcaggcagatgctgtcatgacacggaccggactgagcccgcgtgcttctggagttaaatccatccctgggtgttcggtgcgtccgaattcagcttggcgaagtcgacgaatgccctcaatggcgcgggcatgaacctgcgggagaaataaaggcgcggcccatcgaaaactcatccatgagtccggtggaactagctctagttcccccaatgcgacgtgcggctcgaaccagttatcgaacctgtatatcacaccgcgacccgcgcgcgcccaatcgatggcggcagccgccgcatccacgccgacgatcagcctgccctgtgggtcgatattgaccgactgcccgtctctctccagttcccatggcacgaaggcgccgctcgagaacctgagctgtatgcaggcgtgggcaagcaactcgtccaactgctctggcatgccgacctttgcgaggtatgacggcgctgcgaatgactgcggaggtgtcgaggaattggcgcgagcacaatgtcgttgccgaggcagaacgccgcaggcatccggtatcaggcgatactgacgcggtcgaagcggcgggataaggtgaaggcccgccacgctgacgaagtgggctcaggtctcagtggctgggatgagtttgaaagcaaaggcctgctgcgatagatgtccttttaaagtaacccggctagggcaactcgacatctattccgtggaactcgtctcgaaatgatttcagaccttttttgtcggctgctgtcacgatcacaaatcggcggccgtctccaggtggctcctggtttgacaagtcgaacatccagatcgttgtcgcggttcccctagtgatctcgatcagcttcttcatggctggatctgcgacggcgtcgacgacgaagctcatctgataagcaaacgtctcttggcccgagcctccctggagctgctccctgaaccactgccagacgttgggaaagtcgaccggaaacggagagaggtccatgttcacgtgaacaacgtcccgcgcgaaaatgacctcaccatcgaagaaggcatgaatacctagaaagtattcggggaggtccatgtgcgcggatagcgcgtctttcagcattctcaaattcgaagtcttttggaacacgtacttccccatgcgattgacaaatgcagtcgaaaaaatcctttgttcttctatgggtggcgcagaaccgttaaaagttggccatacgatccaggcgggtattcgtggaggtctcatcgataaagatgagccgcgacaaggccttgttgaagaaccgctttcggcggttgattcaaaggtcacggccattggcgatctccggcctgcgctgctcgcttgccttgaggccttttttattgcttagcccaagccggtgcaaaaaccgcccgaccgtagcgcgatggatttcaattccgcgccccgcgagtgcaacgcgcagctcatcctgagtcgtttcgtcatgcgcggacatccgctcgcgaacccaatcagcatgagccataagcttcgcgccgccaggcgggtggccctgctcggcggcggcgagagaaccggatgaccgatgcaggatcatcatgcggttgaggttcgctctgcgcttgccaacaggcatgacactgcttcggaagcaggtgagccgaacaacacacctcgcccggtcgtgctgtcgtcctccatgcaatttgtcgtaaggtgggtcggtcagcctccaagctgcccgccttcacctgctactggaccttctcggttccattaggcgtcgtcacttgcgtcggccctccaccgttcccagacggtgacgggttgcgatcggtagcctccggagggcggccactaccatcggccgcgttgttgtcgaaggtaccaggacccgagggctgagcattgatcgggtcattcttcgtagcggttgcaggctgaacatcggaatcgacgctctcaccccaaatctcgacgccgccccatgccatcagcgcgaggacaaggctgcagaccagcaccacgaagactggtttgccgtagcttccttgccgagcttcgctcgcggtttctgtgatcttatcagtctgtctgccgttgaactgtgacattgcggatctcctgaacttcaataaccgccgacgattggtaggatttcacctgtgatgtaactcgacatctgcggggacgcgaggaacacataggcgggtgcaatctcctccggttgcgccgcgcgtttcatgaccgccccgctgccaaatttcgcgacatcctcggcctgcttgtcggagggattgagtggagtccagactggcccaggcgcgacggcgtttactcggatgcccttcggcacgagctgactcgacaacgctttggtgaaagcgtgaatgccacccttcgtcatcgagtaatcgaggagctccttggacccttcgaggccagtcaccgaaccagtattgatgatggcggaaccgttggacagatgcgggatcgcggccttggccatatagaagtagccgtagaggttcgtcttcagggtctcgtcgaagtgttcgtcggtcagatcttcgatatccgtggtgtggacctggaatgcggcgttgttcaccaggatgtcgagcttcgagaattgcatcttcgtcttctcgactgccttgcggcagaaggcgggatccttcacatcgccgcgaatgatgagacacttgcgcccttccttttccaccgcggacttggttacctcagcgtcctcggtctcgtcgagatgaacaatggcgacatcggcgccttcccgggcgaagaggattgcgaccgaacgtccgatgccggagtccccacctgtgatgagtccgaccttgtccttcagcttctcggagcctttgtaaaacggcgcgtcgtacataggcgccagcggaaggtctgcctcggatccgggtttgtcctgatggacggccggaaacgggggctctggatatcgacgagcgcccgcctgcatggctccgtccggcttcgacttcttcttctcgtcggccttctttacctgctgctggatctctcgctgttttttggatgtggcttctgacgacatgagacgatctccttgctgttggaggcctaacgtcggccgaggcaaaaggtttgcgttcttgaaagaattcgagcgcacacgaaaaccttgtcaaggcagcctgctggagacatcgaccacgccccccgaattggcttccgtgagcgtctgtcgaccgccctgcctgcgcaaaacgggcgtcttttgcccggacatcgctccccaaagccaagctgttggctgggacgggggcgcttccgttagagcgcggtattttgcgacgagtccaacgcgatttcggtacggcggttgaagcgtggtggttgacctggctggcgtcgcccgctggccctccacaaaggcatcgtcccggatccgaaggtggcaacctccatcatcaattccccagcgtgattgacggatccttcataatgaaactccggggaagcagccatgcgtaccgagatggctactcagccctcgccgttgaactcgactgtgactttcccgtcatcccttttatgactcgagttcctaacattacagttgcgcgttttcatgaactctgaatctatgggtctccatgattgggaggtcatggatggcaggtgcgtcaatcgagacgacgttggaactttttgcatcgtcgctgcgcgacgtgaaggctcgtattcgaagattgtttacgcaggagcgcgttgcggcttcggcgaaccttttcctggacggcttgctgggtgacgagcgccgcaagacaggctggatgcgcgccgaggcggccggtgattccggtccctggcggcaacaagctattctcggtcgcggacgctgggacatcgaaacccgctcatggcatggctggcaccgccacgtttccctcgtcatgctggccttcgccatgatggcggtgatccggtatcgcgccaatgacgcgacgcccccaaaaagaccgcggattccgaccatcaggagttgatccgctggtctatccaggaagtccggcgcatcgccaataagctcgcccagcgtcgcataaagcacgcctacgtcatcgcatggtcgtgttggagacgcgcgcatcaggccgccgccaggcgcgcgcatttggaaacaaaaatgcaactgtaatggtaggcggcaagcgagttgtcgcctaagcaccaaagaaccaggtcagccgttcggtcggatgacgaccttcacgcaaccatcctgcttgtcccggaacgtttggtacgcctcgggaccttcctccagaccgatacggtgtgtgatgaggaacgagggatcgattgcgccctcctcaatcaggtccatcagtggctttagataccgctgaacgtgtgtctggcccgtcctcagcgtcagtcccttgccgacgacggcgccaagtggagtgggcacggcaggcccgatgaacacgcccggcagggatacaacgccgccaggacggcaagccctgatagcctggctcaatgcgtacggacgttcggtagaggtaagcttggtttgcatcgtctccatgacaccgcccgcgccgtggctctccatgccgaccgcctcgatgaccgcatcagggcccttgccgccggttaattcaaggatgcgctgttgcaggtcttcgtcggtgtaatcgagcgcttcggcgccggattgccgggcaagctccagccgttccggcacggtgtcgattgcgaggacacgctccgcgccgagaaggaaagcggacttgatcgcgaagagaccgacagggccgcagccgaacacggcgatggtctggccctgtttgatatcgcagttttccgccgccatgtagcccgtcgggaagatatccgacagaaagaggacctgctcgtcggaaagtccgtccgggaccttgatcggaccgacgtccgcatagggtacgcgtaaatattgcgcctgcccgccggggaaacgaccgtatagttcggagtagccaaagaggcccgcggtcggataaccgacctgcttggcctgttcggcgccgttcgggttagagcgctcgcagagggagaattggccccacttgcactgacggcattcgccgcaggatattgtgaacggaaccacgacgcggtcccctaccttcagtttcgagttgccgcggccgacctcgaccacttcgcccatcgtctcatggcccatgacgtcgccgggatgcattcccggcacgaagccgccatagagatggaggtcggagccgcagatggcgcagctcgtcaccttgatgattgcgtcgcggtcgtgctgaatgatcggatcgtcgacttcctcacaccggatgtcgccgctgccgtgccaggtaagtgctttcatgtcttttgtcctttggattgagtttcgatgatgctggcgggttacggctgccaccgccacccgccgcgccgtagacctgccccgtcgcgtagctggcccgaggatcggcaagttggacgtggatcgatgcgagttcggcgggctgtcccgggcggtccattggcgcgtcgcccccgaacttctcgagcttttccattgtcgcgccgccgctgacctgaagcggcgtccggacggcagccatcgcctatgcccgcgagggcgcgggcgttgccatcaactaccttcccgacgaagagcacgagcgtcgcgctcgccgcggaaaatattgatcgtcggctgatcggaaatttagattgaaatgtcatcttgatcccgtcggcatgtgggcggacatgcccaactcgctaacctctaccgccgggtgttgttcccgctaaatcaaatcgtggcaggaattgccgtggcggagggaacagaggttcaggacgctgccggccccaagggcgcctccgatggaagaggctccggtctttcaaagaagaggcggaaacggtcgaaaaaagtgggacggcagcttgctaaaccatgatcttgtaaaatgggatttttgtcccactcggggttaagcagatgattttcttggaattcggcagaccctcaaagtatgctctcgccaagccttcgatcccagggcctcccagtatgagatcgctgcggacagatcgcgcgctgggctgccatttcgttagccatggcgagaaaccggcaaaaccaccatgttcaccatccctgtcgcgtccggttagcacgctcgcgatctcgaatttggaaatgcggacctggccctgatgttcccccacccccccgtgtacgctaaggtacaaagcatgcaagatgggtcggatcttgcctgagaattggaacctccagctgcccgacgtgttttcaaacgtcatttcataggaggacacgatggctaccaccaagaccaacacgaagacacttgatgatttgttccttgatacgctgaaggatatctacttcgccgagaagcagattttaaaagctctaccaaagatggcccgcgctgcacagtccgaagaaggcaaggcgggtttccttcagcatcgagatgagacgcagggtcagatcgaacgcctggaacaggttttcgaactccttggcaagcccgcccgtggcaagacgtgcgaagcgatccaggggatcatctccgaaggcgaggaaatcatggaagagttcaagggttcccctgcccttgacgcaggattgatttcatcggctcaggctgtcgaacactacgagatcgctcgttacggcacgcttatagcctgggcgacccagcttggcatgaaggatgcaatcccgctgctccaggcaaacctcgaagaagaggaagcgacggatcagaaactaacgcggcttgccgaggcggcggcgaacgccaaggccacgaaagcagcctaacgcttggtcagggctgccccaaaaggggcagccctatcgtatgtcggccagtagccgtcctccgtgatgttgattgggatcggcgaaagtctcgataacgcttccaccgtaaactccacctgcagcatgaatgcccgcattgggctaggcatagcgatgccagtgagtttctcgcgtgctagaaaacggcccacgcccgcctcccgcagacgcctttccccctcggccgcgatcgacgcattcttgctttgagcgacagacttggtttcggttaggccaccttcgattaccctgaacatcccattgccctgattacgttttgcagcctatctcaaaacttaccgcgattcctggcaagtcttccgacattcagcggtaataactttcatgccgcgtgacaaattcgcgacaacactcgtctctgatagcaggagcaagaatcggccacgggctagcttttggtctgaaggatacgaatgcgttacgctgtggtcgatattgatcgccggagcaaggcaacttgggttgttgtacaccgacccatttatcgaagacggcggcgcggggccgaaagtcatgattggaaagctgccgaggctgttcgcgtggagccaattgtccttggcatcgaagttccaatgtatgtgcccaccaaacgcgacatccgagcaacgatccaacagctccctggcgaggcaggccatggaacgcggggggcaggcctagtgtcacggcgatggccctggccctggtgctcgcgatcttggatgggctcgcatcaaacccgccaggtctcagtgcttgcagggttgggctccgagacctcaaagtctcggcgacatactcgtgtttgaagcattcgtcgccctggcgcgtctgatgggcacggcggatgacgcgacttgccgcttacgcagcacgggaacgactggccggggtcgatgtaaccagcgctcttggtccggaatcgtgcatgagcatgctcggtgccgtactcatacatgccgatctttccgacaaccttgaagagcttcgtcggcaatgccttgtggtaaggttctccaaaacaagaaggcccccgaccgctacttagcgcttaccgcccgagccgtcctagcatctcaccgtcccaagttcattaccaaaactgaccttgacaacgcgcccgggcaaggcggtcggaagttaaccctgcgagcgccggtcagagacagcttacttctcccgaggttccctatgtcgaactagatcgaagtcatcatcgttctttccgtcgtcgctgtccctgtatttaaagctatcgagtctccgctgccccactttgtccggttcttaggaactgatgtgggaaccgtcagcgaccttcttggtttgcgttggagcaaaaccggagattgatatgaccgaagaagcacgtcgcccgacgccaccctaccccaagcagcatcaggaaccgccaggcaagaccgaggcgatgcaaccggttcctgaccacggtgagcagtcatacaagggcagcggcaggcttgagggtaaggtcgccctgatcaccggcgcggactcaggcatcggcaaggcggtggcaatcgcgtttgctcgcgaaggagcagatgtcgtgatttcctacttgagcgaagacgacgatgccgctgatactgtgaagtgggttgagcaggcaggccgtcgagcaattgccgccccgggcgatatcacctatgaggagcattgccaggaactcgtccaacgagctgtccgcgagttgggaggcatcgacgttctcgtcaacaatgccgccttccagcgaacctattccgacatatcggaaatacccgtcgaggaatgggaccggacgttccgcacgaacatctacgcacctttcttcctgtcaaaggcggcaatcccgtacatgcgtccaggaagctcgatcatcaacacgacgtcgatccagtcgcggcagccctcaccgccgctgctggcctacgcgtccacgaagggcgcgatctcaaacttcacggcgggtctcgctgaaatggttgccgagaagggtatccgagtaaacgcggttgcacccgggccgatttggacaccgctcatcccgtcgacgatgccagcggaaaaggctgccaagttcggccagcagaccctgatcggtcgcgcggggcaaccggctgagttagctggggcttacgttctgctggcttcagaactcggcagttacatgaccggcgccgtggtcccggtgacaggtggcgagatcatgatctagtgctcttcgtcggcttggctcaccaccgattggcaaacaccaagtatgcgggtcgtgcccgcgagttggcttgcttttgagattgcgcccagcttcattgttgaggtggcatgcgagggcctggcctgtgcagggccgggccttcgccgcggggcggtaaccactcacactgtcctgattgcagctttccgaagccgttgaactgcatctggaccgcgaccaggctcagttggatcaaaccattcccagccaaacttcgacatgaacgtgtacgcttatggccgggttgcaaaacagtggatcctgcagagggccttcgtgggttaaggacaggacctcggcgcagtgcggcttaataaccggttgcagaagagtgcctgctcttccgatatattgtcattggagaggtccatgcggagcacgatttgatgagaaatcagcaagagcggttcggttgagcgtatcttggcagctatgggagacgtggctgtcagcagccagaccctcgacaagctgaaggccaagcgaccggtggttccttatcaaggcgaggagcattgttccgtggttggacggatgatggcgatccgcgccacgcttcatacaacggccttcgtgaggtccaggatagcactgcgatcttcgagattgatagcatcgcttagaggagatgcatctctccagcgccgtcggcactggcgccgtttagccgcgcgccgccgaataatgcgggaaacgagccaagcacggggagcttaaatgcgttaagagatgaccgcgtccttgcgcggccacctcaaatcaactgattaaaatctttacatcaccagcctgtcgcggagttccaagcgcgtccttttgatgcggcgtcggccttttccagcccttgcttaattcgatcatcggaaaatggcttaccaattatgtcgaccgcgccatccaggccatgccccacgtcacccggagatcccgtaacgaagaccacgcttactccaaaacggtccgtgagacgacgggcaagggctgctccactcatgccatcggcgagccccagatccactaacgccacatcaacgcggggtgcgtgagcaagagcctgctccacggtagtgacaggcccaactgctgtgtgccccacttcggcaacaattcgctcaagctccaaggcaataagcgcttcgtcctcgactattaaaactcgcatgacactctcctaaaaaagcaactatttaaatcgccctctgtgaagttcgaggattttcacatgttattgaaggctgccttcccttggctgaccgagacgagaggactgtacaattctcccgcgatggacgttgacgatggagcggatcggccctctgatccacgccatcaagagggcgtcactcaatttttccgctaagaccaatcagtggaggaccgccccgaccgggtatcgtgcatgacggcactgaaacgcagtcagcaggcctagcgcacgcaggaccacgctctcggttaggatgatatccgccacagcaagttcgcccgccgctgaagacatcgcgctgctgacggatcgcagtatcatcccaagggcatcgtcgcccttttccgtcgctacatccgcattactttcaattggcgtggcaagcagctcaatgattgcctggcgctccggtacggtcatgtatctgatgtcaactgttgaagcgatcatgattgccctccgtggttccgccttcgaacaaaacatagactacgcgatcaagccccgttcgagcccaagcgtacggtggcgaacaatgaacttaccattccagggacgcgg

SEQ ID NO: 52 - DNA, 15219 bp, Rhizobium matallidurans
  source 1..15219: mol_type = genomic DNA
ccgcgacacaacagtcccatctagattgtcgcgcgagttccttccagattgccgcgctatacgcgttgaccttccaacggcggaaattctcgtgacgctttattttggaccagttgggctcctggtctacgtccttgccgacaaggaaccggtgcctggaacccacgaagagttaatgaagcctttgtggaaacaatgagtcgggagcacgatccactgcgtggcgggagatgggaccggcatcatcattgcggcggtcattaacgcggttctcggtctccctatgtggctggatatcattatcgaatacgtcgcaggttttaccatcggcctttttttgttttttaggcaatactcacagagcacatgatgcgcggcagcttgggagaatgtccaaaagtcgtttatgcctgagtttatcagcatcaatgcgatgagcggatatggcccctgtcatggcaatcttgtgttgctagagggcgaatgtggaaaatgggcggtctccgaattctggcgattccgccgaggtggcattatgccttgggtaggacttgcagataaaccgagttcgatccggtttttcctacagcatagacatcgtacttggcatttgggttatcccccattccaagtgagccagctggcatgccaggaaccgcgagccccgctatgtccggcgcatctttcagcaacttctcgaccgcctccaaaggcacatggccttcaacgaaatacggtccgacaacagctgtgtggcacccctgcatcgcggccggcactccgtactttgtcttgatggagctcaggtcatccatatcccggatggtgacggcgaagtccgcattttgcattgcttgggcccaggctttgcaacacccacaatttgggtccttgtagaccgtcatttcaagctgggacgcccatgctgggagggtcctgattgcaacaacgttcgcgactgccgagcaaatgaattgtctccggttcatgcgatagttcctttcggtaatggcaacataatgcgctccattgtattctgcgttggtaatgtttcgtgcgaaagtgtggtttttggcagtttccagcccttgacgatgccgtagacggcggggatcacgaccagcgtcagcaatgtggacgataccattccgccgatcatcggcacggcaatccgttgcatgatctccgatcccgcgcccgtgctccagaggattggcaccaagcccgccatgatcgcgacgacggtcatcatcttgggacgcacccgttcgaccgctccgaacatgatggccctgttgaggtcttcccgtccgaatatccttccataggcctcgcactttgccttctcgtccctcagcgcatggtcgaggtagatcagcatgatcaccccggtctcggccgccacgcccgcaagcgcgatgaagccgacggcgaccgccaccgatgcgttgaagcccagccaccacatcatccagatgccgccgaccagcgcgaacggcagggacagcatgacgatcagtgtttcggtcagcgccttgaagttcaggtagagcaacaggaagatcagcgccagcgtaagcgggacgacgatcattagccggtcctttgcccgttccaaatattcgaattgcccgctccatgtgacggaatagcctggcggcatctcgacgctggccgcaacggcggcctgagcttccgccacgtagccaccaaggtcgcggttggcgatgtctacgaagatgtagacggcgagttggccgttctccgtcctgatggtcgtggcgccgcgggtgagcttgacttctgcgacctcgcccaacggaaccgtaccgcctcccggcaaggaaacctggacgtcgcgggcgatggattgcggatcgcttcgaaacgcccttgggtaacggatggcgacgccataacgctctctgccctcgacagtggaagtgacgacctcggagccgagagccatcccgatgacgtcctggacgtcgtcgatggaaagtccgtagcggcccagagccatgcggtcagggatgatgtcgagatagtatccgccgataacacgctcggcgtaggcgctggacgttccgggaacggtcttgaggactgtctcgatgtcacgggcgaccttctccatctccttcagctcggtgccatataccttgacgccgacgggtgtcctgatccccgtggacagcatgtcgatgcgggcgcggatcggcatggtccaggcattggagacgccagggaactggagggcagcgtccatttcctgcttgagactgtcagacgtgacccccgcccgccattcggatttcggcttcaacgtgatgatcgtctcgaacatctccgtcggagccggatcggtcgccgtcagcgcgcgccccgctttgccgaatacagtctcgacttccgggaacgacttgatgatccggtcctgcgtctgcatcagttcggcagcctttgtcaccgacaggccgggcagcgttgtcggcatgtacatcagcgtaccttcgtcgagactgggcatgaactcgctgccgatgtgctggacgggccagacggtcacggcgaggattacgatagccgccaggatcgtaaggctcttggccttcaggacgccagcgatcaccgggcggtatatccagatcagcagtcggttgagggggttcttgtgttccgggacaatgcggccccggacgaacaggatcatcagtgccgggacaagcgtgatcgacagcagtgcggccgccgccatggcgaacgtcttggtgaaggcgagtggcccgaacaggcggccctcctgcgattccagcgtgaagatcggcaggaacgacacggtgatgatcagcaggctgaagaacagcgcggggccgacttcgctcgccgcttcgataaggacctcggttcgaggcttgcccggtggcgcacgctcgagatgtttgtgggcgttctcgatcatgacgatggccgcgtcgatcatcgcgccgatggcgatggcgataccgcccaggctcataatgttcgaaccgaggccgagcgcacgcatcgccatgaacgccatcaggatgccaatcggcaacatgatgatcgccacaagcgcgctgcgaacgtgcaagaggaacgcgatcgtcaccagggcgaccacgatcgactcctcgatgagcgtggctttgagggtttcgattgccgcttctatcagcgtcgagcgatcgtaaacgggcttgatctcggtacctgccgggagactgttttgtaccgccgccaagctttccttggcgttttcgataacggtcagcgcgttggctccgtctcgctgaaggacgatcccgctggcgacctcgccctcgccgttcagttcggtgatgccgcgccgctcgtctgggaccagttcgaccctggccacgtcggacagacgcagcggaacccccgcattcgtcttgaggacgatgttctcgatgtccttgatgccctgcaggtagcccttgccccggaccatgaactcgaactcggaaagctcgatcgtgcgcccaccgacgtcgcggttgctggagcggaccgcgttggcgatatcggaaagcgagacgctctgggccttcaggcgggccgggtcgacgacgatggagtactgcttgacgaagccgcctacactggccacctcggcaacgccctcggatttggagacggcaaagcgcacgacccagtcctgaagcgaccgaagttcggccagcgacagttccttggcgacgacggcgtattggtaaacccagcccacacccgtcgcatcgggaccgaggctcggtgacaccccgtccggcaggcggctcgcggcggcgttcagatattcgagcactcggctgcgcgcccagtaggggtcggttccgtcctcgaaaatcacgtagacgaacgaaacgccgaagaacgagaacccacggacgaccttagacttcggcacggtcagcatcgaggtcgtcagcggataggtgacctgatcctcgactacctgcggagcctggccgggatagtcggtgaacacgatgacctggacgtctgagaggtcggggatggcatcgagcggaagcgtgcgcaacgcatagacaccgctcgcgatggaaagagcagcgccgacgaagatgaggaccaagttgcgggcggaccatgagataatgttggcaatcatggtttcacctcatccgctgtcagcgcgctcaacgcggcgttcaggttgctttcggcgtccagcaggaagttggccgacacgaccacacggtcgccagcggcgatccctttggtgatctcggtcatgtcctcacctcggacacccagcgcgacgttcatcggttcgaacctgccctcgcccttatcgatgaagacgagctggcggtcgcccgtgtcaatgaccgaactgttgggaacggcgacgactgggtttccagatccggcttcgatctcgacctcggcatacatgttggacatcagttggccgctagggttaggaagctcgatcctgaccttcgtcgtccgggtctgcatctggacctcgggatagatgagatcgaccgtccccttgaatgtcgtgccgggcagattgcggacgatcacggaaacgacggctcccttgcggaccgcgcttagctcatattccggtacgtcggcgatcacccagaccctggacacgtctgcgatgcgaaaaagaatgtcgccagcctcggccatcatgccgctcacagccatacgctcgagcacgacgccgtcacgcggcgacgtgtaagcgatactttgcggcactttcctctcggtcgcgatgctgccgatcgttgccgtgggtacgcccagatttttcaaacgaagcgccgccccggagtcagggttggactttgccccgttgcgcatctcggctgcgtattccgctccggcggtggcgatctcctttgaatagaactgaaagaggttttctcccttcgtgatcgcatcgccggtcgtgacattcgccacgtcctccacgaaggcatctgcccgcatcgaaatgatgctcaccctacgctcgtccaatgtgactgtcccgggtactcggattttccggctgacggttgtcacttcggccagcgcagtcctcacccccgtccgctggagtttaccgagagggaccttcaccgttgaactgtcgctgacgtcgccgtcatagacgggaagatagtccatccccattgaatccttcttcggaaccttggacgtgtcgggaagccccatggggttgcggtagtacaagattttacgctcgagtgagacggatgccgtatcgggtgacggcgcgacggctccgcttgggccgaggctgatgtcctcgcttgctcgaacaggaacgaatagccgcccgtcatcggtgttctttggcgtggcggagtattcggccaacccgtccggatggcggtaatagatcaccgctcccgttccttcgcgtcgcggttccgcctcggcggccatcccggtccctttgacgcccccctgaaaaaatgcaccgacatcgtacttcccggcccaatagcctcccccgccgacgatcgcggcgagggagagcgtggcaatgatgcgcgggatgttcacgggacagccttcaggacgacttcgcccttgacggtctcaggctcaccctggaccttggcggcgacctggaaacgccatccgccttccatggaaagattggtcgtaaaggcgtagacgcccggctccccggaggttgccgggtctacctttgtggtcatcgtttccatgccatcgggagccatgtccatccgcgtcgtgaagataacggcgtcgggaacggtcttgcccgtgcgcttgtcgatcaggcgtacggacacggtcgccgccggcccctgcttgatctcggtctggacggcttggaattcgtagtcctgcgctcccgccaacgaagcgttggcggtgcctaacagaaatgcgccggcgaagagcgggctcctcgcgttaaaggtgaaatttctcatggttcaatgtctcattcggacgggtctgcgacctcgtcctcagtcaaatggatcgccatcgctacagcacggacgcgaacctgcggccgtgctgaatcgacgacgtgttcaaggacgtgagatcagactcgtggaggacggactggcgggtagaccagtgaggaagcaagctccccatgcgggggcatgaggaaccgatgagcgacccaaccgatattcaacgaccaggaatgagaggttgccagttgaccgacgatcatcgtcgtgcagatcacagcaaacgggcaggatttgctcgcgcagtctggcttgtccggttgttcgtcgggacagcacggcaggtcgtcaggcatgtccatgccagccataccgtccatcaccacaggcagtgaggcggccatgacgctgtcagccgcgcctacgctcatcggaccgatgacgatcccgagaatggcggtcacgaacagcagtcgatagatgacctttacgaacctcatggcactagtcatggcacggagccatcgccatgggaagacatctcacggaaaattgctgccgctgtttatgcgggatctcgtcgaagaggttgatccatccgcgtgtgcccggattcggaaacgccaaatcttggccactgggccttgaccctcccatcgttggaagccccatatcaaaccagcacatcgacaggagacatcaagatgtatgagttcaatatccagaacatgacatgcggccactgcaagggcaccgtcgagaaagccatcaaagccgccgatccggctgcagtcgccaccgtagacctcgcttccaagagcgcaactgtcgaaacaacgctggacccggccatcatcggcaaggcgatccaagacgcgggatatccggtgtcttacacgacacgttgagttagatcagcggccgtccctgttgctggggcggccttaacccaggcactttctatccgcgaaatctgttgtacgaattcccacgacacctcttgaccttcccatgattggaaggactaaccatatgagcagttaagcaaaaggattgcccgatgactgccatcccgaagatcgaagcctccaagaccttgctcgttccaaccgatttcgggatcgaaggcatgagctgcgcgtcctgcgtcgtgcgtgtcgagaaagccatcgtcgctgttccgggggtcgcttccgccatcgtcaacctcgccaccgagcgcgcaaccgtcacctataatgaggtggtaccaaccgaagctgtcctccaggctatcgagaaggccggttatgaacccaaactcgaaacccgcgagctcggcgtcgagggcatgacctgtgcctcgtgcgtgtcccgcgtcgagaaggcactgaagtccgttcagggtgtgagacaagcaacggtcaacctcgcgaccgaaaaggctaccgttcgtgtcgtctccggaacctccacactcgtccttgaggatgccgtacgcgccgcgggctatgaggtgcgcaggataaccgctgtccgctccacggacaacgacgaggatcgtcgagaccgcgaggccaaccgcctgaagatgtcgctggccctgtccgcggcgctgacgcttcctctgttcgtcctcgagatggggtcgcatttcatcccggccgtccatgactggatcatggtgaacatcggcatgggcaacaacctcgtcatccagttcgtgctcgccaccgccgtcctgttcggacctgggctccgctttttcaggaagggcgttcccaacctgcttcattggacccccgacatgaattcgctggtggtgctgggcacgtcggctgcctggggttattccgtcgtcgcgacgttccttcctggtatcctgccgccgggaaccgccaacgtctactacgaggcggcggccgtcatcgtcacgctgatcctgcttggccgcaccctcgaggcgcgggcaaaaggcaagacaagccaggcgatcaagcaccttatcggccttcaggcgaagaccgcgcatgtgaagcgaggcgaggacttcatcgagatcgaaatcggagacgtgtcactcggcgacatcgtgcgcatccgccccggcgagaaagtcccggtcgacggccgcctcgtcgatggtggttcttacgtggacgagtccatgatcactggcgaacccgttccggtgaaaaaatccgctggcgacgatgtcgttggcggcacgatcaacaaaacggggtccttcacgttcgaggcgacgaagatcggcgcggacacgcttctcgcccagatcatcaaaatggtcgaggcggcgcagggctcgaagctgccgatccaggcgctcgtcgatcgggttacgggatggttcgttcctgctgtcatcgcagccgctgtctccactttcctggcttggctgctactcggcccctcgccagcgctgaccttcgctctggtgaacgctgtggccgtgctgatcattgcctgcccctgtgccatgggcctggcgaccccgacatccatcatggtcggcacgggccgtgccgccgaattcggtatcctcttccgcaagggcgaagcactccagaccctgcgcgacgtcgacgtcgtagcattggacaagaccggtacattgacgaagggcaaaccggaattgacagacttcgttgtcagcgacggcttcgaccgcgctgaaacgctgcggctcgtggcaggcctggagacgcagtccgaacacccgatcgccgaagccatcgtcgcagcggcgaaggccgacggcctttcactctctaacgtctccgatttcgaggctgcccccggctacggggtgagcggccggatcgacggccggacagtgctggttggtgcggaccggtccatgaccaagaacggaatcgatgtctcgtcgttcgcggaccaggcggccgctctgggcgatgcgggaaagtctccgctctatgcagccatcgatggtaaactggccgcaatcatcgcggtggccgaccccataaaggacacgacaccgcaagccatcaagaccctacatgcgctcggtctcaaggtcgcgatgatcacgggcgacaacaggcgcaccgcccaggccatcgcccgccagctcgacatcgacgaagtcgtcgccgaagtcctgccggacggcaaggtcgaagcggtccgcaagctgcggagcggcgggcgcaaggtggctttcatcggcgacggcattaacgatgcgccggccctttcggaagccgacattggcctcgcggtcgggaccggaaccgacatcgctatcgagagcgccgatgtcgtgctgatgtcgggtgatctcaacggggtgccgcgggcgattgccatcagcaaggcgacaatccgcaacatccggcagaacctgttctgggccttcgcctacaatgtcagcctcgtgcctgttgcggccggcgtcctctacccggttaacggcacgctgctgtcgccgatcctcgccgcaggcgcgatgggcctgtccagcgtgttcgtactagccaacgcgctgcgcctgcgacgcttcaagacaacctgacggaaggaaaccacgatgaacatcggtgaagcatccaaggcttcgggcgtctcgaccaagatgatccgctattacgaacagatcaagttgatcacgcccgcacaccgtacggagtcgagctaccgcacatacggcgacagcgacgtccatacgctgcagttcattcgccgtgctcgtgacctcgggttttcggtggagcagatgaagacgctgctggccctgtggcgggaccgttcgcgggcaagctccgacgtcaaggcgatcgcgcttgaacacatcgcggaactcgagcgcaaggctgcggcgattgccgctatgacgaagacgttgaagcatctcgccagccattgccacggcgatgatcggccggactgcccgatcatcgaaggtttcgccgacaccttggagaacatcgggcctggtatgccatccaagtttggcctcgccaacgttgtctaaatgaatttgatcagtccatgttgacccgaaacttcgcgtggcacgacgtgcaagtctgaagcatcatgtgaaaagcgtgttctgcgggcattgacgctgcatccctctctgcgtctacctttcttgcgagcggtccgcctcccatggcatctcccgtttgcatccgcgtttctggtccaagtgtgtcgggatttcggtcagctgcgacagacagcgcggaggcgtacgtgccaagctcttttgccagcttgtcgaactgttggcggtcggtttcaatgcttgggctggcttttgagccaggcgtggcaccggagccgtcgaacagcgccgacaggctaagtcccgagtgagccagaatggtctcggcggccgctttgaaagctcttgcgtcatagggcgacaagtccttgaacatggcgtcgatggacttggcggcgtttgccatcgccttcataccatcctgtctttggacaaccttgccgggcgcagcgttttgagcgatagccaaggagatcaccgtgccgaaaatgactattgaaagcgccgaagtggccagtttcgtcactctcgccttcaatgccatgctacactccattttgccggaggctattcctcctgtttttgaccatcccgttacaccggagccaaaccttctgggtctgaaaccgtccttgagcttgatcaggatcaacgcaactcttgccacgccacggtactatgcttgagtacgacgatagggaccgaacgacatcatgatcgccgtaagccaaaccattcgacgatacgcgagaggattgctggccgttttggtcgcaattatgttcctcgtcgcgccgatggccgaggctgcttccgaattatgcgataacgacttacctcaagcgctacatgtcgaaacgtccatgggcgaagaagctcgccaagatgatcgccaccatgtcgagcagatggtctgctgcaaaagcgtgtgcagcctgtgcaatgtcatccttccgcctacgaaccctggtgtttttcacgtagggtctgtccctcgcagataccttcatcctcagcagtcaatcacaggtctcagctaccgacctgttctcggccctccctgatccgttctctgaacacctccgctcaacggcggtatgatccttcggttgcctgccatagctgcacggcgaccattccggtggcgattgtcgaggccgccgtgctgcgtttcctttcgaagtcctggagacgaaccaacagggagctatctaatggacgagcaaaaaagccatgaaagtcaccacaatcatcatcaagggcacggtgctcaggccacgctcgtggcccaaaagagttcagtgacgtatcagacggagggcgtaatttacacatgccctatgcatccgcaggtaaagcaaattggccccgggaactgccctatctgtgggatgactcttgaaccggaagcagccacaacggataccgggccaagcgccgaatatctcgacatgaaacgccgtttctggatcgggctcgttctgtccgtgcccgtcctcatgctggagatgggtggacacctcaccaatcttcacatggtgcttggtgcccagacctcgaattggattcagcttgttctggctacacctgtcgtcctatgggcaggctttccattcttcgagcgagcatggaagtccctcgtcactatgcgcctgaacatgttcacattgatagcaatggggaccggggtcgcgtggacttacagcgttgttgcaacccttgcacctggtctgtttcccgccactttccgctccgcagacggttcagtcgccatctatttcgaagctgcagccgtcatcacggtgctggtgttgctgggacaggttctggagttgcaagcccgtgaacagaccggtggagccatccgcgcacttcttgaccttgcccccaagacggcacgccgcgtccgcgacggtgtcgacgaggacatcgacctggaaatggttgtcgtcggggatcggcttcgggttcgccccggtgaaaaggtcccggtcgatggcagccttatcgaaggacgcagttcggttgatgaatcgatgatcaccggtgaatcgatgcccgtcaccaaagaggtcggtgcaaagctgataggcgggacgatgaaccagaccggtggcttcgtcatggaggcaggaaaagtcggccgcgataccatgctgtcgcagatcgtccgcatggttgcggacgcccagcgctcgcgagcgcccatccagcgcctggccgacgaagtctcaggctggttcgtccccgtggtgatcggcattgccatcgtcgcattcgcagcatggatgatctggggtccagaaccgcgctttgcccacggtcttgtcgccgcggtcgcggtgctcatcatcgcatgcccctgcgcgttgggccttgcaacgccgatgtcgatcatggttggcgttggccggggtgctggtcttggtgtcctgatcaagaatgccgaagccttggagcgtttcgagaaagtcgacacgttggtcgtcgacaagaccggaaccctgaccgagggtaaacccaaggtaacgtccatggccgcgataaatgggttcacagaacccgaactgctgcgcctggcggcaacgctggaacgagcgagcgagcatccactggcaactgccatagtcaacgcggcgacggagcgccagttggttctcggcgtcgcggaagatttcgatagcccggttggcaaaggggttacgggaagtgtcgacggacgcaggctcatcataggcagccaccgcatcatggaggaagctcatatcgatgtctcggctcttaccagccaggcggaggcactgagaggagaaggcgcaacagtcattttcgtagcggtagacggcgacctcggcggccttttagcgatcgccgatccgatcaagacgacgacacccgacgcagtccaagcgttgctcaaggcaggggtccgggtcgtgatgctgacgggcgacaacaagacgacggccgccgcagtcgcacgcaagcttgggatcaccgaggtcgaagccgaaatcctgccggaagacaagagcgagatcgtgaagcgtttgcgagaagaaggccggatcgtcgcaatggcgggggacggtgtgaacgacgctcccgccctggctgcggccgatgtcggaattgccatggggaccggcaccgatgtcgcgatcgagagtgctggcgtaaccctgctgaagggcgaccttcaggggatcgtgcgggctcgtgaactgagccaggcgacaatgagcaatatcaggcagaacctgtttttcgccttcatatacaacgcggctggagtaccgattgccgccggattgctctatccctcgttcgggcttttgctgtccccaatcatcgcagcggctgccatggcgctttcgtcggtaagcgtgattggcaatgctttgagattgaggagtgtgcggatatgaggtgggatcgagaatggacgctgctttctgcgtcgcaggctgtcgcctgataaactaagtgttggggaagagcatgtgagagtgctctcccccaactttcaggccgccattttagcgcagctgtccgcacagcgacggcaagtcgctacacacgactccatgtccccgacgcgctcacaatcatcggcgcactgagcgcaaatctcagcgcattctcggcacacgtgcttgtgatgctctgaacccaggagcatgaaatgagccgaagtccggcaaatttccgcgcaggccatcataagcttcaaatgcttcggctccgtatgttcgccgcccatttccaagcagtgccccatagccatcgataaacactcgcgatagcaggcgagacaattgtcgatgcagactttcatttcatctgaaatgtgatgcatggtcatgcttccttcctacttcgcttccttgtcgagccagtcagtcatctcggcgatttccttggtctgcgcgtcgatgatcttctgtgcggattttttggcccattcgttgtcaccatatttcagctcgacctcggacatgctgatcgcgcccatgtgatgggcgatcatcccgcacacgaaggcaacgtctgcgtccttcttcatcatgccctgcatcatgttcatctgcatcgacttcatgccttccatcgatgccttctgatagtcggtcatcatgtcgcccatgcccatgtcaccggacttcatatccatctttgacatgtccatctcggacttacacttttccggataggccatctctgcgaacgacatggcgggcatgacagtgagcaatgacaaagcgcatgcagcggcgagcgagattcttacgatagttttcattttagttctcctgattggatacaatttggtacgcttcgcaactcagcttagaagctttgggggcggatagtccggacgaagaaacagcaaactgattggttgttcgaccgcgacgaatacaacagccctccgtctgtctggaccaccaagcacgtccaccgagactaagattgggcagcaaatcatggtggggcagcaagcgtgtccaacagaacctttagaatcgtggctagatgccaatgaagagattgaagggcagtgatcggcagatgcgccacccgccagcgccgttccatggatatttgacaagatgagaagtatcgcaagaattagacacattctcttttttatgctgcgaccgaacatggaagattttcccttaggcatgcaagtgacgctcctgcgatgctccggtgaatgaccctgagaaacgctcaggttcgccatcggttccgtgaagcgccacccgacaacgactacaaatcaatttcgttcgactgccgctcttgaccttgccagcgttggaacgggcgtgtcgcaaacacttctggaggcagctatcacccagccaaggccggtattttcatgctttgttaaccttttgcagtccgaagaggcgcgcaagcaaatcattctggtcattgacggtccagccgcctgaaaagccaaagcccttccgcagccacagcatcgcctcgaaacccgcgatggttcgccgcgccgtgttaaaggattggaaaccgccgatcttcggcatgttcttcttcacccggaaatggtcgctctcaatcccctgctggagatgtttggtcacataatgcacgggatcgggatggagaagcccatcatcaaccgacgttttgatcgttgacggg

SEQ ID NO: 53 - DNA, 13235 bp, Rhizobium matallidurans
  source 1..13235: mol_type = genomic DNA
aactggtaccactaccgacacaccaaaaccccacgccgcccgaaagcccgtgtctcaaccattccaaacttcactcggacggggcgctggaaatcacctcgattgagtaagtaaagtatggcgcttcccagcgccccgttcggcggtttttatccgcgactccgatctctctgcctttccgcccaacttcgcggcggaaccatgtgtgcctcacaggcacgtccgggctcaactcggtcacctcttgcgagggaaaccgccgtcaccggagggagatcattttccgcggacccggaccgtgaggttttgcgtcctaccctcacgctccgcgccgatcccgcctcgccggcacgcctgccggggtatccgatgacgggacgcgtttattgtagggcgaggttttccgagtggggaaaatcgacgcctggattttgtgtaagtggttgatcgtcaacgccctcaccgcctccgacatcccccgctcgaggagccgcatcattcacggcgagggcattcagtcgcagcggctttcgcggcagcgggcgaaggcttatatgaggcgtgccgcaggaagcggcggaacggattttgcgatggacagcgagatacagggacgagcggcgcattcggcggcgatcagggagcgggccgaggccgagatggcgcgcatggggatcgatgcggcgtttatcgatcggctggtcgagacgttttacggccgcgtgctcgcgcatcccacgctggggcctgttttcgacgccaggctttccgggcggtggccggagcatatggagaagatgaagagcttctggtcatccgtcgcctttcgcagcggcgcttatggcggcaagccggtgcaggcgcatgtcggcgtcgccaacatgacgccggagctctttccgcaatggctggcgctgttttccgcgacgcttgacgatatcgccccctcggacgaggcgaaggcctggttcatggcgacggccgagcggatcgccaggagcctgacgctgtcgctgttctataatcccgcgctcgacgatcccaggttgaagaagggctgaggacgccaggcctgcctgaaatcaggcgatgcgcttgtagaagaaggtcgaggcgcagaagccgccttgcggccagagcgcgtaatcagggatgacgccgacgcgctcccagcccaatcgcggataaatcgcctcggcatcgctgccggtcgcggtatccagcacgagaatggtcttgccgcgacgggcggcttcctcttcggcggcgcgcatcaagagacgcgccaagcccttgccgcgggcggcgcggtggacgaggagctttttcaggtcggcacggtgcggctggttcggcatctgggcggcgccgatctgcacggtgccgagcaccctgccgtcaatctcggctgcgaaaagcagggtagcgccggaagcgacgctctcggcaacggcccgccagtagggctcggcatcttcacgcctgtagggctgcatgaagccgacggaggcgccgccatcgacgcaatcgacgagcacatcgcaaagatcgggtatcgcggcgcgcgcctctgtcgcgtcgagcaggcggatggtggtcatggggtctcctgagatcagttagtggcggcggcggtcgagcacgacgcaatagcgggccggcagggggccgggattgtgaaagacatggccctcggccacgggcatgaacaggcaatcgccgggaagcaggcgatgcacggtgttgtcgccggtcgtcatctccatttcgccatcgaacatccagatatgctgggtcatgccgctggccgccgcatgcggcgggaagctgacgcgggcgccggccgggaactcgacatcgacgatatcgacatccgacgcggtgcccggcggcgagacggcgcgcctgatatagccggtctcgggatcgcgccagacctgctggtcctgccggcgcgatagcggcgcggcctcgccctcctcggcgaagaaggccgacagcgacaggccgagcgcggcgcagacgcgggcaagcagggccgcggtcgggctcgcctcgccgcgctcgatgcgcgagatcatcgcccggctgacgcccgaggcgctggcgagatcgtcgagcttcaggtttctgtcggttctcagcctgcggatcctgacgccgatcgcggtttcgagttcctgttccattatccgatccatatttctactataatagaaatgcatggttcgatcgtggaatcaagccctgttttcacggcgctgcggcgcgacttatcgtaaacgaaaccctgcttttccgctttgcggcaaggggatgcgctgctatatggcgcgcatgagcaccaattcgacccgcacgcccctcgaccatatccgcaacttctcgatcgtggcccatatcgaccacggcaagtcgacgctggccgaccgcctgattcagtcgaccggcggccttgccgagcgcgacatgtcggagcaggtgctggattcgatggacatcgagcgcgagcgcggcatcaccatcaaggcacagaccgttcgcctgcactacaaggccaatgacggcgaaacctatatcctgaacctgatcgacacgcccggccacgtcgacttcgcctacgaagtctcgcgttcgctgtcggcctgcgagggttcgctgctcgtcgtcgacgcctcccagggcgtcgaggcgcagacgctcgccaacgtctaccaggcgatcgacaacaatcacgagctggtcacggtcctcaacaagatcgacctgccggcggccgagcccgaccgaatcaaggaccagatcgaggaagtgatcggcatcgacgcctcgcaggccgtgctgatctcggccaagaccggtctcggcattcccgacgtgcttgaagcgatcgtgcaccagctgccggcgccgaagagcgaagccggcgagaagggtccgctgaaggcgctgctcgtcgacagctggtacgacacctatctcggcgtcatggttctggtgcgcattctcgacggcgtgctttccaagggcatgaccatccgcatgatgggcacggacgccaagtatcaggtcgagcgtgtcggcgtgctgacgccgaagatgctggccgtggacagtctcggcccgggcgagatcggcttcttcaccggctcgatcaaggaagtggccgatactcgcgtcggcgataccatcaccgaggacaagaagccgacggcgaaggcgctgccgggcttcaagcctgctcagcccgtcgtgttctgcggtctcttccccgtcgatgcggcggatttcgaggatctgcgcgccgccatgggcaagctgcgcctcaacgatgcgtccttctcgttcgaaatggaaagctcggcggcactcggcttcggcttccgctgcggcttcctcggcctgctgcatctcgagatcatccaggagcgcctggagcgcgagttcgatctcgacctgatcgccacggccccttcggtggtctatcagctgacgatgaccgacggttcggagcgcgagctgcacaacccggccgacatgcccgatgtggtcaagatctccgagatccgcgaaccctggatcaaggcgaccatcctgacgcccgacgattatctcggcggcatcctgaagctctgccaggatcgtcgcggcatccagacggaactcacctatgtcggcaagcgcgccatgctgacctacgagctgccgctcaacgaagtggtgttcgatttctacgaccgtctgaagtcgatctccaagggctatgcctccttcgactatcacctggccgattaccgcgagggcaacctcgtgaagatgtcgatcatggtcaacggcgagccggtcgacgcgctgtcgatgctcgtgcaccgctcggctgccgagaagcgcggccgcgacatgtgtgagaagctgaaggacctgatcccccggcacatgttcaagatcccgatccaggccgcgatcggcggcaacgtgatcgcccgcgagacgatctcggcgatgcgcaaggacgtgaccgccaagtgctacggcggcgacgcatcacgcaagcgcaagctgctcgacaagcagaaggaaggcaagaagcgcatgcggcagttcggcaaggtcgacattccgcaggaagccttcatcgccgccttgaagatgaaggacgagtaagtcctctttgcttcttcctgatatgcgcatatcatatgcgcatatcaggagaccgatcatgcctcagacccgtcgcaaggccgccaacctgtcgctcgacagcgagctcgtcgcgcaggcgcgcgaactgaacctcaatgtttccaaggccgccgaagacggcctcaggcgcgccatcaagagcgagcgcgaacggctgtggctgattgagaacgccgaggcgattgcggaatcgaatgcctacgtggaaaaacatgggctgcccttcgccaagtaccgcacattctagtggcgcgctttcgcgtctatgaagtgggcgacgactatgctctcgatgtgcagtcgcacctgctctatcggctcaatacacgtgtcatgatcccgctcgtcgttgccagccaggttgtcaacgtcatgtctaggctaaaccccgtcgttgtggtcaacggcaggaactatctgatgtccacagagcgtatggcatccattccgctgtctgagatcggcgcggagattgccgatctctcctcgcgaagcgacgacatcaccgcggccctagattttctcttccagggcttctagctaggcgttcttcgccatgtaatccttggtcagccgttcgtaatcctgcatttccggcaaagcctcgtagctgtgcgtcgcgccggtttgcgcgaaagcgagcttctcgcgggtccacgtctcgatgaagggcgtgaaccagcttgcatcgtcgagcatggtcggtcgcaggttgacgaaccactccatgccttccgttttcgtgaacatccaggtcatgcagtgcgggcagaaataatggtgcgacatggcgccgtgcaggccaccgacgacgggttcgccgctggtgatctcgaagccctccgaggggaccgccacgctcagcgaaaaggcgctcgacgacatggtctggcaaccggtgcagtggcacgccatggtcagaagcggcttggcgctgatcttcaatcgcacgcggccgcagcggcagccaccctcgctcggcaaattcaattggctcatgtctgtctccaaggttgtcgccgagatgatagcgtccggctgacagagatgaagggggcgttgcaaacaaatgcgctccgacgacgaattctcaacctgcgggacgagaccgccacgcatccatcgctgaccgtgcatcgttgaaaacgcgaaataatctgtcgcgagcgcgacatatccgtacctgtcggtgaatcggcagcggccgatacatgttcaatccaagattgtctatttcatcgctgagacacgagcaaaacatctgccgggaacgtcgcgccaacgccatgccgacggcgatatatcggcttttaaccggctaatcgcgctgttttcgcccggttttccccgttatccgccgcgttcgttttggggcttgcaacgttcgacctttacgataggttgcgcattgacttgtacgtaacaggtcaccatgggaacaacgacgaataaaaggcgctaaaagcctagaaaggtgggacccacatgaacttccccacgaagacgattctggcctccgcgatatttggctcgatgctggcattctccgcgcaggcagccacgatcaacatccacaatggcggcgatccgcaatcgctcgatccgcaaaaattgtccggcgactgggagaaccgtattgccggcgacatcttcgaaggtctggtgaccgaggacgccaaggacaatccggtcgccggccaggccgagagctggacgatctccgacgaccgcaaggtctataccttcaagctgcgcgatggcatcaaatggtccgacggccagccggtgaccgccggagacttcgtcttcgccttccagcgcctgatggacccgaagaacgccgccgactacgcctatctgcaattcaccatcaagaacgccgagaagatcaacaagggcgagatcaccgatttcagccagctgggcgtcaaggcgatcgacgacaagacgctcgagatcacgcttgaaaacccgaccccctacttcctcaacgcgctgatgcactacacggcctatccactgccgaagcatgtcatcgacgccaagggcgccgactgggtgaagatcggcaacatcgtgaccaacggtccctacacacccaccgaatgggttccgggctcgcatgtgacgaccaagaggaacgacaactactgggatgccgcgaacgtcaagatcgacggcgccaaattcttcgtgctcgaggaccagcaagccgctctgaagcgctaccgcgccggcgaattcgacattctgaccgattttccgaccgaccagtacgagtggatgaagaagaacctgccgggccaggcgcgtgtcgcccccttctccggcctctactactacgtcatcaattcgcagaagggcccgaccgccgacaagcgcgtgcgccaggccttgtccatggcgatcaatcgcgaggtcatcggcccgcagatcctcggcacgggcgaactgccggcctactcctgggttccgccgggcaccgccaattacggcgagccggcctatgtttcctggaaggacctgccctacaagcagaaagtcgaggacgccaagaagctgctggcggaagccggtttcggccccgacaagccgctgaccctggaactcaagtacaataccaacgataaccacaagcggatcgcggtcgcgatcgcggccatgtggaagccgctgggcgtcaatgtcgagctcgtcaacgccgagacaaaggtgcattacgaccagctgcagcgcggcgacgtgcaggttggccgcgccggctggctggccgactacaacgatccggacaacttcctgaacctgctcgtgagcggcgtgcagatgaactatggccggtggtcgaatcccgagtacgacaagctgatcaaggacggcaatgccgaaaccgatctgacgaagcgagcggagctgttcaagaaagccgagcagatcgcgctcgacgacagcgcggcgattccgatctactactacgtttccaagaacgtggtttcgcccaagatcgacggcttcgtcgacaacatccaggacatccaccgcacccgctggctgtccatcaaggaataacgagaggcattgtcttcaccctgcccgggggtgatcgcagcttgataaaggccctctctggcctgccggccatctcccccacaaggggggagaagacctgccgcgccaaccctgccccaatcacgcttcggcggatcggctgggtcaagccctcccccttgtggggagggttgggaggggtctttacccaggctattgccttcgcttgcgggcgaaccagtttcgactggtcgcgagcatgcgaaagacccggcgcaggaaagaccgtcaccaccatgatcaattatgcattccgtcgattgctgtcgacgatccccgtcatgtggatcgccgtgacagcctgcttcttcgttctgagacttgcccccggcgggccgttcgatggcgaaaggccgttgccgccagtgatcctccagaacctggcggcgcactacaatctcgataagccgctgatccaacagtatctctattatgtcggcgacctcctgcagggcaatctcggcccctccttcgcctcggaggacttcaccgtcgcgcagcagatcatgatcggcctgccctacacgttcaccatcggcaccgcggcctttctgctggcgatcgtcatcggcgtcgccgtcggctgtctcggggcgctctaccagaacaaggcgccggattacatcctgggcgcgctgatcctggtgggcgtcgtgctgccgaacttcctgattgccccgatcctgcaactgatcttcggcatccagctgcaatggctgccggtcggcggctggggcaatggatcgctgaaattcctggtgctgccggtggtcgtcctggcgctgccgcatgccggccgcatctcgcgcatcacgcgcggctcgatgatcgaggtgatggggcagaatttcatccgcaccgcgaaggccaagggcatcggcccgcgtctgacgatcatgcgccacgcgctgaagccggcgatgatgcctgtcgtgtcctatctcggaccggcggcgagctatcttctcaccggctcgctggtcgtcgaaagcgtgttcggcctgcccggtatcggccgctacttcgtcaccgccgcattgaaccgcgactacggcatggttctcggcacggtcatcttctacatggtgctgatcgtgttcctgaaccttctcgtcgacatcgcctatgcctggctcgatccgaaagtgagaaaccgatgatcctcaatcccgcaaagagagatcttctcgcggccgaactgctggaagcggaaggtctcagccccgtcagccggtcgctgacccgcgatgccctgcgccgcctctgtcgcaacaaggcggccgtcgcctccatcgccgtcctcgtcctgctggtgcttgccgccttcgtcggcccgtatctcatccccttcggctacgaggatccggactgggcggccttccgctcgccgccttcgcttgccgatggccactatttcggaaccgaccccaacggccgggatctgctcgcccgcgtgctctacggcacccgcgtctcgcttgccgtggcgctgacggcgacgcttgtctccgtcgtcatcggcgtgctctatggcgcgatctcgggctacatgggcggacgcatcgatgccgtgatgatgcgcttcgtcgatatcatgtacgccttcccctacatcctgttcgtcatcctgctgatggtcatcttcggccgcaacgtctacctgctgttcgcggcgatcggggcgctcgaatggctgaccatggcgcgcatcgtgcgtggccagacgctttcgctcaaacagcgcgaattcatcgaggcggcccgcgcctccggccagaagccattcaagatcattacccggcacatcattcccaatctcgtcgggcccgtcgtcatcttcgcggcgctgacggtgcccgaaatcatcgccacggagagctttctctcctatctcggcttcggcgtgcaggaaccgctgacgtcattgggaacgctgatctcggaaggaaccgacgccatggagagcatgccctggctgctcgtcttcccggccggcttcctcgttgccctgctgctcagcctgctgttcatcggcgacggcctgcgcgatgcattcgacccgagggatcgctgacatgacagatcacatcagaaaagaaacccttctggagttgagggattactcgatcagcttccgcacgcccgagggcgaggtgaaggccgtctccaacatgaacctgaccatccggcgcggcgaacggatcgccatcgtcggcgagagcggctccggcaagagccagacctttctcggcgtgatgggactgctcgccaagaatggccggaccagcggacaggcgctgctcgaagggcgcgacgtgctatcgctgaagccgcgcgagctcgatgacgtgcgcggcaaggacatggccatggtgtttcaagaccccatgaccgcactcaatccgtcgctcaggatttcccgacagctgacggagcagctcgaggtgcatcgcggctttaccgcgcgcgcggcctcggcggaggcgctcgacatgctgaagcgcgtcggcattccagacccgtcccggcgtttcaacctctatccgcacgaactctccggcggcatgcgccagcgcatcgttatcgccatggcgctgctgaccaagccgaagctgttgatcgccgacgagccgacgacagcgctcgacgttaccatccaggcgcagatcctcgacctcttcaacgatctgacggccgagatgaataccgcgcttgtcatgatcacccacgatctcggcgtcgtcgccgggctcgccgaccgggtggccgtgatgtatgccggtcgcatcgtcgaggaggcgccggtggacgagctgttcgagaacccggcgcatccctacacggcggcgctgcacgcctcgatcccgcgcccggaccaggacgtcgaccagctcgccgtcattcccggccggccgccgaacctgcagcacctgccgaagggatgcagcttctcgccgcgctgtccgctcgtgcagaacgactgcatcgacgcctcgccgcgcctagaagcgcaggcgcctcgccatctcgcggcctgcttccatgcctatccacgcctcgaggaggttctgaccaatggctgaacgatcacttcttcgggtggagaacctgacgacccaattcgacgttccctccaagggcttcttcaagccgccactgacgctgaccgccgtcaacgatgtcagcttcgatctcagcgagggccggacgcttggcatcgtgggggaatcgggctgcggcaagtcgaccctcgggcgctcgatcctgcggctcctgaaggcgcagaagggccgcatcctctggcagggccgcaacctgctcgacctctccgacgaggagatgcgggcggcgcggcgcgacatgcagatcatcttccaggacccgatcgcatcgctagatccgcgcatgacggtgggcgacatcatcgccgaaccgctgacggtgttcgagccgaagctcaaccgcgcgcagcgcacggaacgggtacaggagatcatggccgccgtcggcctcgtgcccgagatgatcaaccgctatccgcacgaattctcgggcgggcaggcgcagcgcatcggcattgcccgggccgtcatcacgcggccgaagctgatcatctgcgacgagcctgtatcggcgctcgacgtgtcgatccagggccaggtgatcacgctgctgcgcaagctgcgcaaggaattcggcctgacgctgatcttcatcagccatgacctttccgtcgtgcggctgatttccgacgacgtgctggtgctttatctcggcaaggtggtggaggccggcgattgcgcgacggtgttcgacaagccggcgcatccctatacgcaggcgctgttttcggcagcccccatcccggacccgaagctggcgcgcaaccgccagcgcatccgcctgcagggcgacccgccatcgccgctcaacccgccaaagggctgcgtcttctccccgcgctgctggaaggcgaccgacatctgtcgaaccgagatgccaccgagcgaggaggtcaggcccggccagacggcggcctgctaccacatggagcgctgacgacccgatggccacggtatcatccgtggccatcggccgaccaagagctcgcgcgcgtaacaccccttgatcgcggatcatactgtggctgatgcgtagtttttcggccttccctccgtcgccggttgctctatggtgcactcatcaacgtggaggggtttcatgcggatgctgtttctcgttgtcatgctgctcctgaccggttgcggtcatccgagcggcgtgatgacgcccgtggcgctgacggcgacgacgccgaagacaacccgtgtcaacatgctggtggcgaccacgcgcgaaccttcgggcgatccggcgacgctcttcaacggcgaacgcagccccaagccatcgctgaccgcggtgtccgtctccattccgccgaaccgcaagccgggcaccgtgcaatggccaagccgcctgccgccgaacccggccacggacttcgccgtcacctcggtgcagcagatcgggacggtgaaggaagggcgcggctggctcagccagaacatgcgcaacggccatgcgctggtcttcgtccatggcttcaacaaccgatacgaggattcggtcttccggctggcgcagatcgtcaacgacagcggcatggacgcgacgccgatcctcttcacctggccatcgcgcgcgcagatcaccgcctatgaatatgacaaggaaagcaccaactattcgcgcaccgcgctggagcaggcgctgagaacgctggtcaacgaccccaatgtcaaggacatcaccgtgctcgcgcattcgatgggcacgtggctgacgatggaatcgctgcggcagatgggcattcgtgacggccgcctgaacagcaagatccgcgacgtcatcctcgcatcccccgatatcgacatccaggtcttcgccaagcaatatgccgagatgggcacgccacggccgaagttcaccatcttcgtgtcgcaggacgaccgggccctggccttctccagcttcatcaccgggcgcgtctcccgactgggggcgatcgatcccacggccgagccttaccgcacgaagctggaagaggcaggcatcacggcgatcgacctcacgaaggtcaacagcaacgatcggctgaaccacggcaaattcgccgaaagccctgagatcgtgcagctgatcggccagcgcctgatgaccggccagccgctgaccgacagcaatgtcacgctcgggcagggcatcaccgcggttgtcggcggaacggtcaccaatatcggcacggtcgcggcgaccgcggtcgccgtgccggcgacaatcatcgaggcgccgatgacccgcccgcagaagaacaagccggccacggccaaggaaacgctgcagggcgacctgaaggaacagcagctgacgcaataggcgggtcgacgccgggcttgatggcggaagccgagaccaggaggattcaatctcgagctggcgaggagcgcgatcaccgcgccgcgcgcggtgttgcgagtacatatctgcgcacgccaaaagccggcgttgtgcgggctttgttcgtcttgtctgatgcgattgattcagtctttggaatgattggttgcgggggcaggatttgaacctgcggccttcaggttatgagcctgacgagctaccgggctgctccaccccgcgccagcgtaaatcccttcgggatttatcgcgcttgagtaaaccgcgaagcggtttgctcttacatcaggagcaaaacccttgggttttgttccggtaagggacgcaccattatagatcaggtgcgtcgaagtttcattctgcatgttcggaccagcaaaagcaaaaggccgcttgcgcggcccgatgttttcggctgggccgaagtttcgatcagagaagatttg

SEQ ID NO: 54 - DNA, 12893 bp, Rhizobium matallidurans
  source 1..12893: mol_type = genomic DNA
cgcctcatggctgaggacagccgcatacccggcagcatcgcgaaatgcctcgaagggcggcatctggatgtaatccatgatcggcgaataataggcctggttgccgccgtgccgtatcacggcgccggtgttgcggaagaagagatcggcgcgcgctattcgctcgacaggatcccggaccttggccggcggagcatgataggtgtcgggcaaaccctcgatctgctctatattgaacacagaatatgccttgaggaacggaatttcccgatcgacctcattgccgtttccgtcggcaaccgacttggtgaaacggctggcgaagacgaccgtcgagcccgtttcgcccttccgcacagccccgcccagttcgagggcctgtttgaaggtcatccacatcgaggatgagaagccccgcgatacctgctccgaccacaggagcagcacgttcatgccggaatagggcaggccgttgtggcgcatcggccggctgatgcgactatgcgtattggcggcgctccatggtttcatccagggacgaacgccctgttcgagatcttcaacgatccgatcggtgatccgcgtgtagatatccgcacggtccgattccgaattctttgtcatgacttcttttccttttctcaggaccgcgcctatcgctgtccgtcacggaggtccgaagtcaggggccgaggtcaaggccatgcaccggaacggccgcaacagcgtgtaggacggcgaagccgttgcatgggtgcccggctcctgcaggaccgccgagcgggacgggccgcgacagacgcgtctcccgttctccatttcaacaaagaaaggccgacgcatgcaggcgccagcctcggaaagagaagaatggggcggggtgaaaccccgccggctgtgtcatcccaacgccgccatctgcgtttcggccgccttgcgatcgagcaatgcaccggggttctcgaccgggcggtcgaagggcttccaggtctcgccgatgacctgttcgtaagccgtgactgcgccctcggctgccatgcgcagcgcgtgcgattggacacccatgtcggccgcgaactcccgtttgcgctgggcggcgctgtcatagccgaccggaccatcgagatcctcgtcgcgggcatcattcgaggccttggccgtcgcgtcacgcgcctctgtgacggcgcgggagtagaattgcccggcgccatgcgcggatccgacgaaggccccgacgatgcgctggaggtggatctgcatcgccttctcgccgaggccttcggacaggctttcggcggtctcgacgatcagccgctcgtgaaggctacggatgccatcgctgtcgacgactgccgtgccgaagcttgtcgcgatcttggacgcctgggtggcgtcggggcaggagaggcggaccatttcgagggtggtgcccttacggagttgcgacgacctggcgttggagcgattgggggtagagggcttggccatgtctgttccttccttggtttccgaagcggttccggctcgtgccggtctgcccttcgatgcggacgaccaggaaccggcaagggacgggcggcttcacaggtccgatccggctgagccagcagggcagggttgcgagccagcaggtcttgacctgagcagaccgcgagcctgccgtcgcgcagagaggctggatcggccgccccgcggcgcgacagcggccttgaaacgaccggccgccggttcagaccgcagcgaacaagaagggcagtccggcacgggtccgatatcaatcccaaggcaagcaacagacatggccaagccccctgacgatgacatcgaagccgggtaggacatcgccaggtcctttcgcctcgggacctcctatatcgccggatgcagcacaggctcgcggtcgcgatgccggaacgcccggatgacctgctcctgcatcgccagcctgcaggcgatcgtgtcgagttcgacccagcgctcgaaggcaaagcggtcgaagagctcccgatggtagagacggggactggaccggcgccgcgcgcggctccggaccttcaccgtggtctcctgtctcccggagcgcgccgcaatctggcgggtcagacaatcgagatgccgctgggtctcgcgccgggcgccgattgctttcgccagcggcctcaaggggcggatttcgatcatgacccatccccccggtttcgccagccaatgaaggaggaggggccatcatatttagcgtggcgagcgagatcgatgacgaagccgaaccgcccccgccccgcatattcgtcgcttgccaccagaaagcggcgttcttcaccaccgcggatatggcctccgccgatcttcgccacgacctccgtcatgccggggcgctgatcggacaagattgccgacataacgatgtagtccgccgcatggcgttgatcgaacgcacggcgatctttggcccagctctcgccctcggcgagcgtgcggccatggatcttctcccaggcgtcgggccagatattgcggatggtcttttctgccgttgaccgctcgtaggcggtgaacaggtccgggaaacttaccgcgacgatcgcccattcgcagtcttcctcgtaccagggcatatccttgcgcagcagcggatggaccttggcattacgctctgtcgacagatggaaaccgccatgccctgatgtcatgtgagcgacgacgccctcggcatagacaaccgccgtctgcgatccgccccatggtgtgcttaccgacatgcgggtttgcacgcggtgcagcttggccagttcgcgtttgtgaccagcagtctcggcaacgcgcgcccggaactcggcttcatcggcaacccggccgtcatgcccgatgaattctgcccgcgtcagatcggcgagtggccgacggatcgcaccggcgcttgcaacaaaagcaaagccgctgggtgatgtgaccatggcaaggaccaggtcaccgatgcgggccaggggcaggccgtctgcgctggtggcaaactccacccccgaaagatcgggggtggagtttgcaatgttcgactggagggcggcggtcatgctgcatccctcagatcgacatcttcatcataatcatcatgaccgggcaaatccgcatcctgcggctcgccatcgaccgcatcgtcggtatcgtgttctggctgatctactgataggtcatcgagatcgctgtcgccgtgattttgggaccccgcgtcaatgacatccgtggcggcgcctgcccggatccagtccagcaactcgtcagccggcggtgcgaagcgacccgacggatggacaaagtgcttagttgcgaaatgctcgacgagcgctgtacgcgtctcgcggaccttcgggcgcggctggatcgatgcctcagcgcaagaggcttccagtgcctggcgcgacaagcacaagaggaaatcttccgagcccatgtttggcaggaacgcgtcggcgccgatcgcctcgccggcgatgcgcgcgaccatgccgctgttcgacatgccccgccggcacgagaggacgtcgatcagcaccgagcgggcggcgacccgaagcgtgtcctgatcgaaggcgagcttgccatgctcgtcaaacagtccgacggcatgacgcgagaagcgcttgccgccgtagaaggtgccatctgcgccggagtcgatgcggacattctggccggcgaaggcgagcaccatcagcgccatcagcatatcatcctcgatcggcgcgcgaccgagcgcatcgtgcagggcatcagtgcggaaatcgccgatcatgtcgtggcccttctgcgtgacgtcgggccgggctttcggcgtggcgactgcgtcggtgtcatcgccgccagtgaccgatccgtcgccaacagcacccttcggcttcgccgcctcgggcatgcggtaatgcaccgtctggaccttgccgtcacgatcgaggtagagcgccgtatggtcggacttggacggcttgccgtaaacttgggatcccttcttcggcagttccggctggccccagctgttgacctcgacgatcacgccgcgcttcggcaggttgctcgtcatccattcgtgctgggcgccaagaaaaccttcgacattggtggtgtagcggccgtcctcgtcggccggtgcgaagagatcctccacccattcgatgccgtaggcctgagccagatcgtcaccgaagctcgcgtccctggcatacatgcgctttttcgtcagcgcattggcgatctgccaccatggcgccgtatcacccttctttggcttgtgcgccttccagacttctttctgatcgacttggcccgcggccgcgatgacccgtagctgctgctcggacggcatgtcgcccagcgccatctgctccagcatagctggcaggacattggcaagcaggcgcagcttgcggatctggcggacgggaagagcaagagcgacggcgatcgcttcctctgtccagcctagtgcaacaaggcgttcaatacctcgccattggtcgacgggattgagcgcttcgcgaacgctgttctcgaccatggaacgcatcgcgccattgtcgttggctgcatcaacgacgaggatttcgatttcttcgagaccggccgcgatggcgaggcgcacccgacgatgcccggcatcgataatgtagccgttgccaccatccgtctccggggcgaccaccggcggctggacgatgccgacggccttgatcgtcgccagcatcagcgcatcggcctgcggcgacgacttcgactggcgcatccggtcggggttttccttcagagcgcgcgggtcaaccttgatgatctgcatgggatttgtccttgtctagagagttccggaccggcgccttgccagcccttcctgtcttcatttttctcgaagacatctcccggaccgctgatcggccggactgacgcaactgcgaccgagcatccctgctgcgaagaataagcggggctgacagccctgcgaaggacgagtagccgggatggcgcaggtggcggttgagcagctgcgtcggcaggaggatcgatcagcaatcggttctttccctccttcatttcctcttctctaccggagagcgggctcgcgcacgcgcaggcgcgataggcacgaagaacctttccaggaaactgaaacgcaaaagggcgctcgacccgcgaggggagcgccctttttctgatcccggacgacatcgaaagccacagcgattgcggcggcaggacatcatctgaacgggaagtgatgctcagatattgttgatggtgggaaaattcaactcgcgaccgtgaacactcgctgataattttcgccaccctccaagagggccagtcgaggaaagatgagtacagatcctgaaacccggagggccatcgcagaccgcgccattaatcgcgcgaagtcccgtggtgcgccgatcgacgaggacccaatctttagggctctgctggatgcatggatcagtggcgacatcgacatgcgtccgatgcgcgagcgctatctcggcagtctttctctcaaggaagaacagcaccgtggccgtcagcctggccaatatgagataattttggatgatgatgtgtaagaaaaaagggccgacggagtaaaccgcggcccataaagtgtggagatctaagacctccagaggggaacagctgctgcggcggaactgggaggagaacgccatatgcatcagctgtgggctttatgcctgatttttggccaatcggaaaacatttattgtgcaataacagctatgcagccagcgcgttggtctcattgccgaggctgcccgccagctgagtttcgatgtgacgtagttcgcgccttttctccttcaggtcgtcagcgaacgcgaacgctcctccgtctcgcgaacggtatgaggccagccggcgctcggcctcttccaaccgccggcgatattgacgccgctcctcctcgaagccttcaagtccatgctccagccgtgagatggcgcccagcggagtgaccgtgattgcaagctcgatctcctgacttacgccagtgcgatggagcagcgtctcgtagcgatagccgtcgcctttgccgaaccgctcaccctcatagaccagatcgaagccgccgatcgttgcgagatgcacctcgccctcctgctgaagctgcagaagcgtgaggatttccttcatcagcgcccggcccgcttccttgcgctcggcatgttctttgccgagcaccgtcatggtgaaggcgtcgccggtggtcgactgcagccgcgcgatgtcctggccgatttgctcaatcctccgggtcgaaacatcgatttcgcgctctgcatcgcgcatctgccggcggacggcgtattgatcgtcctcgtgggcggcccgcagccgttcgagccgtgcgatatcggcctcccaagcctgccttctgcatcaaccgttcatcgccggatgcgatcgccttggccatggcgaactggttggccgccccatcgccaacgtcttcgagccgccggatcgaggtatctcccgacagagccgcggcaatgaagcgggccttgcgctcgttattctgccacatgctggcatcgagcgaaccctcggtggcataggcgaagatatcgacctcgtcgtgctggttgccctgacggacgatccggccttcccgttgctcgatctgcgacggcagccatggcacatcgaggtgatggagtgccttcagccggagctgggcgttgacgccggtacccatcgtctcggaggagccaatcaggaaacgaaccttgccggccctgacatcaccgaacagtcgctgcttggcttcggtcttcttgtagtcctgcatgaaggcgatttgcgaggagggcacgccgagccggatcagctcgtcgcgaatgaagcgataggccgagaagcctcggctcttctcgacgttgatcgtgccgagatcggaaaagatcatctgggctgcccctggtagatcaaaatccttgccgtcggggcgccgatagacggcttccccggtttccttccatatccgatgggcattgcgtacgagcagattgagcttgttattctcctcgttgtcggccgccggcatgacgaagcgcatgtcgatcgccgcatggcgcccatcagtgatgacggacagcagtatgtcgtcacccggcttggcgggcccctcacgctgctcgatcgccttgatcctgctgccgagggtctgctgataggtcttgaacagtgccgtcggcttggccgtcatgatctgccgccggccggtcgagatgttaggcaccttaacatactgccggagatcctcgggcatcaccacatcggcaaacgagcggaacatggcgatcagctccggcacgttgacaaaggatgcgaagcggctgaccggcttgtatttgccggatggctggatctccaattccgtagttgtatcgccgaagcaggatgcccaggcatcgaattcgtgcagcccacgctcggcaagcgccgcatgaccgagtaggcgctggatggaaaacatctcgcccagcgtgttcgtgatcggcgtaccggacgccagcaccagcgcgcggccagggttcttcgtttcgatgtagcgggacttcacatagagatcccaggcccgctgcgatccattcggatcgatgcccttcagcgtcgacatattggtggcgaaagacagcttgcggaattcctgcgcctcgtcgatgacgatctggtcgatgccgatttccgaaatagtcagcaggtcatccttgcgggtcgccaagccttcgagccgctcctgaagaccttcctttagccgctctaggcgcttgcgcgagacgcggtcttcgctgtcaaccttggtcaacaggtcctcataaagctgcaactcatcctggatcatctcgtgttcgaaggcagagggcacggcgatgaagcggaaggccgaatgcgtgatgatgatcgcgtcccaggtcgcggttgccgcccgtgacaggaagcgagcacgcttgtctttggtgaagttggtttcgtcagcgacgagaatgcgggcattcggatagaggcctaaaaactcgcgggcggcctgcgccaggcaatggccaggcacgaccagcatggccttggcgatcagtccaagccggcgctgctccatgatggccgccgccatcgtcatcgtcttaccggcgccgacagcatgggcaagataggtcgagccatcggcaatgatccgccagatgccgcgtttctgatgcccataaagaacaaaggcgccagaggcgccaggaagtttcaggtgggagccgtcgaatttccgcggcgcgatattgttgaagcgctcgttgtaatcgcgggccagccggtcggtgcgatctggatcgatccagacccagttctgaaacgccagcttgatcttctggagcttgtcgcgcgcggcttcagtatcgacgacattgagcactcggcgctcgccgtcggcatccttgaagacgtcgaagatctgagagacccggctgttgagcgcgtcagacagcaggtcgccggcgtggcggcggctcgttccccattccgatgtgccagcggcgctgtaaccgagttgtcgtgcctccaccgtccatgaaccaagctccggcatatgatggatgcggatatcagcctgcatcttttgcttgacgaaggcgacgacatcggcggccgggatccaaggtgcgccgagacgggctgtgatatccgagggacgcagatcggccggctgaacatctagaagcgcgcggacattacgctcatatgacgggtcgagctctgcggcagcctgcgcggcggcgagctttgtgcggacggcccctgagagatatccgtctgccgtcttccacgatccatcggccggatcacggaagatggcctcgcccagctcgtcgaccacatcagcaggatcgctgtgcagcagctcggcgacatggtcgatatcgacgtggcctcgttcattcagcacgacggcgagcgcatcggcaggtgaggtaatcgtcggtgcggccggcggagcaatcacgcgttcggaaaaaatcggccccggtttcgccgtgtccgtctccagatcgtagtcctcgatcgaggcgaccagccagcaatcgggatcgtcgcggaacggtgcgaggttcggttggcgatgcgtttccttgacctcgccggtctcgatatcctcttgaacggacacgactgtgtggttgatcggcccgaaatcgcgcacaaaactcgaccaggcgatgcgcaatcggatttggagatcgcgccatggccgatcggttttctgcgccttcaggacctcgcgcaccgcatcgcgaatcgggatcagcttgctgatgatccgaacgtgtttttccgagattccatcgcctgagcgacccttgcggacggtgaccggcatggccgatccgtcgagcatctgcatcaggcccttcgaccggtcgaggaagaagctgccctcgcgaacggagccgcctctcggctgcaaggcgacgatctcgccgagctcgtcttccagatcgatatcgatgggcgtcggctcgccgtcgtagagatcggcgggcaatagatcgattgcagcggcgagggcggcgtcgagatcctcgtcatcgcggggccggcatgtgtaggtctcgccgaacgggccggaggtcagggcgtgtgtgccgagcacgaagtccgtatgccgaccaaaccagcgattgaccctgatggcgccttcgtcgtcggtggccggcctgatctcatcgacatcgagccacagctgatttccctcaggctctccgggcttgcgcttgcggaagaacagaatgtcgacgacgacatccgtgccggcgtcgcgacggaagctgccctcgggcaggcggatcgctgcgatcagttctgcggatttggcgatatgctcgcgtgccgtcgtatcggccttgtccatggtgccatgcgaggtgacgaaggcggcgagcgcgccgggcttcagcaggtcaatcgaccgggcgatgaaatagtcgtgcagacgaaggccaagcgaccggtaagcgcggtccgagcggacggtgcgatcggagaagggcggattgccgatggcgagatcgtagatcggagccagatcggtgcgggcaaagtcgccattgatgatccgcgccttcggctgaagcaggcgggcgatgcgggcggtgatcggatcaagctcgatcccggtcacataggcggcgtcacgatatggctccggcatcagggcagggaacagccccgtgccgatgccaggttccagcacccggccgccgcgccagcccagtttctggaccccagcccagattgcgctgatgatgaactctggcgtgaaatgcgcatattgggtgcagcgggcaagcgacgcgtagtcgctctcgcaaatcgcgctctctagcgaagaaccaatatcgtcccagccccggcggaaatcgacctcacccggccgacggaacataccgttggccagttcgccggcgccgaagccggtgaagcggatcaactgtgtctgttcctttgccgtcgccggccgctcctgcttggcaatgccgtcggcgacgagtatcgccgcgacattggcgcgggcgcgatccttccaggaggcggccagcttgcggtcaccgtcgagatagaagtttgcccgaagccttgcgcgccggacaggcgtggcagcgacggggagggcgggtgcaggtgctggcggcaggggatccggatcgtcgtcattggcggcatcaggcgagaacccgccgaacgctgtcacgccaagcccgaggccggacgaaagcacgctcgagccgaacatgtctgatgtaaagggatcgttgctcatgagaaaagctcctttggattgagggcgtgcgccattgctcggccaacgagaaggccgctttcggcgcgaaatttgcgaatgatgatccggctcaggcggccagcgatgcggggaggtggcgcaaatggaccggcagctttgccgcgatctcgtcgtcggacagggtatcgagcaacttcaggaacgtgccttcactgccaccgtagagcatcaccgtgcgatggccctgcatcgccgtcggccaacgcgcgccggcatagcctcgatagtcgtcggtggtcgtgctccatatatgctcaagccgttcttcgcggctcatggcccggactggtcgggtttcgcggtcaacgattgcggtccgcatcgcctcgacagagttcgggtccgcgagatcgcagtaggtgtgaaaatagcggaccgcttcatcaatccggatcgcgtaaaacaccgatgtcaccgaaccggtcataaactcgcgcatcgcaaagatcggcccgcgcatccagagcggcggcagaatgtcgagcatataggagtaggaggtttcatcgatctcgaaccattcgccggcatagacggcagactggtcgccagcaaagcggtcggggcgcatcgcgtgcctgtcgaacatccggaacatgtcggcgcgcttggccgctccttgaaagattttgcgaggaagggctatcgaggtcatcagcttgatcctttttgaggttttggaccgaaggcagcacaagtcgtttcgaccttgccattctcttcagtccttcatgaccccttccgcgctgccggcctcgtgttcggccgggtcaagggccggcgcatgccgggcggagcctcccttgatgcggccggcgcgcatgcggcaggcctcgttattcccttcggtcttcctttcccgtttttccctctccctgttttggagaacctcgttccaatcctccgccggcggacgtagcctttgccagtcacagccggacgcctcggcgagcgcacgcagtcgttccgcatagacgtcgccttgaggattggcatccgtggccgcgaccattgtaagtcccggccgcacagcaagttcggcaagcgccgcatctgtcgccggagaccacccaccgccagtgctgagatagagagtttgctcgcgcggaccctcgagcgctgcgaggctcatcgcgtcgatcgcggcctcggtaacgcaaagacgagaggcatcgcttggtccaaagcggaaaagaaccttcgagcccccggtggcaaagccacgccagtcgggaccgcgctcctcccaacccataacgcgtccctcgctatcggcatgggccgcccacatactgccgaagggtccttcccgcaggacaccctctcgaatcgcctgccgggcgatcgccgtcgggatccagcgcgcccagcgcagatagcgccaggcaccggatccaggcgaaggcgtgggccggctgcgccaacgttcgcaaatgtcttttactggcacggaagaccgcgaggacctccattccggccgggaaagttgaaccccgacaagtgacgcgaccgcttccgttgcggacgggaatggaattccttccaggaacatggcaaggccgaagacatcgcctttctcctcgctgagcggatcgaaccaaccgcgtccgtcatgcgtgacaatgacgatgttgccgccaagccggtatttgacggcgcgtcgcgtgctttccttcatatcgatttcgtaaccggctcgttccagcacggcttcgcaactcaccctggcgcgcagcgcctccaactcttctctcttcattgttttccgatcacttgtcgatcgcccttcttttccaatccgcatacctgcggccatcctcgtttccgccgcgaagaatggagggggcaagggcgcggcaatcaaggtgcagatttgcaccggctgcggcgaagcgtcccttgcggccgacagttcgccagcggcagggagatgcgggtctcaatgagacccgcgggggaaatattcgtgcttatgcgcagctccgcataa

SEQ ID NO: 55 - DNA, 12203 bp, Rhizobium matallidurans
  source 1..12203: mol_type = genomic DNA
cgaagggcggatgagggggctccggatgctgaggcgaaccgcatttgcggatcacctgcgcgcgatgtcggcttccggcccaagccagtaattgagtgtcgtagaaatcggccgcgaaactaaccttcgcgacactacgccatgtaaccgccatcgagtacaagcggactgccgagcataaaggaggaagcctcggagcaaagccatagaaccccattcgagacctcaagaggcgttccaagtcggccgattggctcttgccctatgatctgagcaccgacttgctcattcttcttgataaaagtctcgattggtggtgtgccaatccaacctgggcaaatagcggtaatacgcacgccatccttagcgtgttcgagcgccgcgctccgcgtcaaacctaaaactccgtgcttggcagcggcatatgcggcgcctcctgtaaaaggatagcctcgcagtccatcgaccgatgaattgttgacgataacgccgcgtccggctttgagcatggcgggcaactgatagcgcatgcagaggaaaacagacgtaaggtaaccgttgatcgtcttgccccacgcatcctcgctcatgctcgctatcggggacattttcccgccgctgccagcattgttgaaggcgtagtcgatctgtccgtattcattcagtatcgaagagatgagcctctcgacgtcgcgaccgttcgtcacatcacattgcgtccaacgcccgcgcccatcgcccccaagcgtggtcagggcatgcttcgcccgcctctcattgcggctggcgatgatgacggtcgcgccttcgtgagcgaaagcttgtgccgtcgccagcccgattccagtgctgccgcctgtgacaagggcaatcttgccattcatttcggggtatctttttggcagcggttcttgcgtcataggctggcctcctttgtcccgatagagcgatacgcaatttcccaattattgtggtgtcgcaaaatgtggcggtctgcaaaagccgcaatgtctcctattggcgcgaagctgtttcccgcctttacctccgtgccgcaaccccaccgcccaatcaccagccgatcacgccaacgccttgagaatcaaaatccggttcgcggtcgcgaacgcaatcaccccgtcctgctcgagcgcccgcaagaccgctttgatctcccccggcgtatatccatcagcgcccagccggtcgttgatatcaagcaggttgatcgtcacgtcaggcttggccttgagcgcgcgcagccgtccgatcaaggcgttttcggtatcgtcaaatctgctcacctgattacctcagccggcgatcggcgcggtagcaccattccgcttctcgcgaaaatggctcggcgaagcgccgatcacgcgtttgaacgcgcggctgaaggacgcctcggaatcgtagccgagccgttcggcgacggctgccacccgctgcccctcgcgcagccattcatgcgcctggtgcatgcgcatccgcgccacgtagcgcgccggcgtttcgccgacgacgctgacgaagcgctgggcaaagccggagcgtgatgcgcccatgtggcgcgccagttcgttcacgctccagtcgtgcgcagggtcgaggtggatggcggccagcacccgcccgacttccgggttgcgcaccgcggcgagccagccgctggcgtcgccgcagccatgctccacccatgtccggatgatggtggctgtcagcacgtcggcaagccgcgacaggatgccacccgcgccgacgcggttcatctccacctcgcgcatcatggcgtcgagaagcggcggtatcgtcggctcgcccttggcgagatcgctggtgcgcatgacatcgggcatcaggttgaggagcggatgccgcttgtcgacgttgaagcgcatgaccgcgaaaaaaatcaggttgttgctgtcggtgcatggacattgcaggtcgacgatgccatcgcagagcggcttgcgcggcagctgctcgagcggcgtcggcgaaatgcccggctcgctcgccagcacatgcgcgtcgccgcgcggcaagagcacggcgtcgccgggccgcatctccgtccacgcgccatcgggcgcccgcagataggcgctgcccgccgccaggaagtgaaatcgcgcttccgcctgggcgggataggccgtggcccatggtgccgacggctggcagcgaccatattcgacgccatcgagccgaagcccgcgaagcatctcggtcaatggatcggtcatcatggcctccggcaggtttggacgaattgttatgctttatagcttttgcagcatggaaacgccagatgcttgggcgtagcgtcaccgcagaatttacggagatgcatatgaatattcactcagatgtcagccatccaggcgtgaagggcgagacacccgcggcatgggcaggcgttgtctcgctgtcgcttggcgtatttgggctcgtgacggcggaatttctacccgcgagccttctgacgccgatgtcacaggacctcggcgtcagcctcggcgcggccggtcaatcggtgacggccacggccgtggtcggcgcgctggcggggccgggcatcgtgctcgcgaccgcccgcttcgatcgccgctacacgcttttggcgctcaccagcctgctcgtcatctcgagcctgatcgccgccacggcaaacgggctcatgaccctgctcctgtcgcgcgcgctgctcggcgtcgggcttggcggtttctgggcgatgtcgctggcgcttgccatgcgcctcgtgccggagcggctgatgccgcgcgccatggcaatcgtcatgaccggcgtgtcggcggccaccgtctgtgcggcgccggtcggcgcctgggtcggcgaggcgttcggctggcgcgccgccttctggatcgcctcggcgcttggcgtcgtcgcgttccttgtccaggcgttcacgcttccggccatgccgccgacggggtcggccggtctcggcacgatggcccaggtcttgcgccgtccggccatccggctcggcctcgtcaccatactcttcgtcgtcgccggtcatttcgcgggcttcaccttcatccgcccgtttcttgaaacggtgccgcgtttcggcgtcgaggcgatttccggcatccttctcgccttcggtattggcggcttcgtcggtaatatcgccggcggcctgatcgccgagcgcagcacgacgcttgccatcacgcttgcttccacgggcattgccgtcaccgccttcctgcttgccttcgcaggcgaagcgccggcgctcgccgccatagccacagccctgtggggctttgccttcggcgccttgcctgtcagcgtccagagcttcatcaccgaggccgccgccgacgaggcggagagcgccggcgccctcatgctgacgacgtttcaggtcgcgatctcgagcggcgccgtgcttggcgggttgatcgtggatgtccagggcgcggcaggcgtcttcgccttcgccggcatcgcggcccttctcggcgccaccctgatcggcgtcgccagccgccgcgggatggtcgccgctggctgacggtagcaatggattgattactgcgggtcggaaggttcgcggcgaatgcgaatgtggagccatcattaggtggctccacatttttgtcggggttttcggcccttagcttcgtctcaccagtgcccccctcacgctaccgtctccccgaggggagaggggaagagaccgcggagggcgccgcttttcccttctccccagcggggagaaggtgcccgaagggcggatgagggggcttcggatgtcgaggctagccggcttgtctggtcacctgcgtacgatgtcggctatcggccctaaccggtcattgggacacggcgagaataaacaagtaaactagaacgagccagcctagtccgagcaatgccagttgcttgcgcggaacatcgtgaatcgacttgtatcgcgacaccacgaaccaaacgacgccgcaccccacaagaacgatgagataaggtgtggcttaggcaagtccgcctatcgtaacaagcctcctatatccgccgcttctcgtcggcatccactattgcgtctggctacctcaacgaagaagtccatcagccaaaatcagcagcgcaaatgatgataaacataggccaatgctaccaaacatcgctgctcgcaggcctttaaaccgattgctagtgaagaaggcgctcgaacggctgaatttgcgcccctgacgctcgcccagagatagtttttcttctcccggaagagttgctagcgcttttgtgcgttggatgatgagtgcatttgtgatgatgcctcccaacacaccgagtgcaaagagtgccatcagtgaattctggatgatttcgaaagagatagccaattcaacctccacggagtgtgtcgagaaaatacctcttatcggttaatatggtgcgaccgcccgacacgtccgcaattggcgcttagcggccgactcttgaggtcggccaccggccctttgcggccattgaggtctgctgatacaaaagcaattgcgaccacgataacgagactttcatggacctagtcatcgaacttaaggctgtcctggagctgccgcccgacatcgaggttcttcggatcgaggcctccagcgcgggtttccgttttatggacaaacttgtcaacgagtgggagtcgcaggcaaaccggtttgacaaacacggagagaggctgatgtgtgcttttcacaatgcacagctggtagctgtgggcggcttgaacatcgatccttacgtagatgacccaagtattgctcgcctgcgccatctctacgtactagaacgcatccgccgacaaggggtggcctctcgcgttgctcgccatttactggactcagcgcgaacctcattctccggcgttcggctgtttactgatacggcggaagccgcggctctctatgagaagcttggttttgcgcgcgcgaactccgtaaatgccactcacatcattagattcagatgactgcttttggcctagccgccgtcgcatcccgaaaagtctccggcaatgcacgatacccccgataaccgaggcaggggtatcgctgaactccgtcaaaacgtgacgcaaaggcgtggccgtgttcgtctctcgttacgcgccgccctaccgcgcttccgcgatccgctcgaaggccgacggccggggaatcccgaggtccagcgtctgccggatgatctcggcgcattccagcggcgtcagaagcgacgtgtccacttccagatcgtagatgcccggctggtgcacgtggtcctgccagcgctgcaccgaatcggggatcgggtcttccgcgcttgcctgctcgtacaatccctcgcggcccggcatgcggatgtcgcggcggcgcatgatcgtgtcgagcggacaatgcacgccgacgaagagaaccggaaagccttccagtctgcgggcgcagtcggtcaggatgccgagcggctgcgaatagaagtcgtggtgcccgagatcggcgacgacgttgaggccgaggccgacatggatggcgatggtctcgtagagtgcggcgtaaaagaacggcaccatctcctcgagatcgggccgctcgccaccgggacgcagcccgatgcccggcagatagcgctccggcgtcatgccgttataggcatcgacgccgaggttcatccacgggccgtcgaattcgtcctggatcgccttggcgatcgatgattttccgcttcgcggtgcaccgttcagaatgacgatctgagcggcggggttttcctcggacatgtgttttcttcttttgtttggcgcgaatcagtgaggcgaaatcgcgcaggcatttcacttcgcatttcgattacattatgggtgactttatggcggtgactcaccgcatcgggaggatagcatgaacgaggacggcgcgcatttcccgcctgtggacccgttgaggaccggtctgcgcggctgctgcccgcgctgcggcaatggcaagcttttcaacggcttgctgacgctgaagccgcgctgcgccgcctgtggtctcgattatgcctttgccgacgccggcgatggtcctgccgtcttcgtcatattgatcgtcggcttcgtcgtcatcggctcggtgctgtggctggaagcaaactattcaccgccgatctggctgcatatccttctcttcgcgccgctgacgatcatcctctcgcttctggcattgcgctggtgcaagggcatcctgatcgccatgcagtatcgccacaatgcccgtgaaggacgtctctcccgtgactgatgccaaagccgcaccccgccgcgcgccatccgtgttcaccgccgcggcggtgctcgtcgcgctcgccatcctcgtctcgctcggcacctggcaggtcgagcgcctgcgctggaaggaaggcctgctcgccgatatcgccgcccgtctcgcggcccccgccgtgcccctggccgagatcgaagcgatggccgcgaagggcgaggatatcgagtatcgccgcgttaccgcgtcgggcgtctacgacaacagccgcgaacgccatttcttcgccacctggcgcggcctgaccggctactacgtctacacgccgctgaggcttgcggacggccgtgatctcttcgtcaaccgcggcttcgttccctacgacaacaaggagccggagacgcgcatgcagggccagctgacgggcgaacggaccgtcaacggtctcgcccgcgcccggttgccgggcaagccctcctgggccgtgcccgacaacgacgtcgccaagaacattttctactggaaggatctcgacgtcatggcctcgagcgccgggctcgacaaggccgctgtcgtgcctctcttcgtcgatgccgacgacacgcccaatcccaagggcctgccggtcggcggcgtcaccgacgtcaacctgccaaacagccacctgcaatatgccgtcacctggtacggcctggccgccaccctcgtcgccatcgtcgcggtcgcatggcttcgcaggcgcggcgatccgcccgcgcaatagtatcgcttcaattcgtgcctatattgggctagaggtcgttcagttcgcagcgaacgcgatagccgttggcggggagttcttctccctcattcctgtgctcgtcacaggaatccagccacggcgcgtcggcgccgtgaacagagtcttttgcgctcaatgacttgagcgcgctggattcctgtgacaagcacaggaatgagggaatataactcggaaaagacatgaatattgccgtttcaaaacctccactgacgatcaggctctgcgggccgcgcggcttctgcgccggcgtcgaccgggcgatccagatcgtcgttctggcgctgaaatcctatggcgcgcccgtctatgtcaggcacgagatcgttcataaccgctatgtcgtcgaaggactggaagccaagggcgccgtcttcgtcgaggagctgaacgagatccccgaagagcatcgcgcccagccggttgtcttctcggcccacggcgtcccgaaatcggtgccggaggatgcgacgtcacgcaacctcttctatctcgacgccacatgcccgctggtctccaaggtccacaagcaggccatgcgccacaacaagctcggccgccacgtcgtgctgatcggccatgccggccatcccgaggtgatcggcaccatgggccagcttcccgaaggcgccgtctcgctggtcgaaacaatcgccgatgtcgacgtctacgagcccgccgatcctgataatctcggctatgtcacgcagaccacgctttcggtggacgacaccgccggcgtcatcgcgcgtctgcgggagcgtttcccgaatttgaccgcgccggcggccgattcgatctgctacgccacgacgaaccgccaggaagtcgtcaagcaggcggcacccggctgcgatctcttcatcatcgtcggcgcgcccaactcgtccaactccaagcgcctcgtcgaagtggcgctcagggcaggggcgaagaagtcgatcctggtgcagcgcgcctccgagctcgactgggacgatatcggccatgtcggcacgctcggcctgtcggccggcgcctcggcgcccgaggtcatcgtcaacgagatcatcgaggccttccgcgcccggttcgatgcccgcgtcgagcttgccgagaccgttcaggaaaacgagcacttcctcgtcaaccgcgaactgcgcgacatcgagctgacgacggcggatatggcgttcgtgaacgggtaattggtggtcggagggtgggccacccccctctatcctgccggacatctcccccacaaggggggagatcggccagccgcctgctccctgcgccatcgccaacgacaattgtttggggaagacgctccccccatccaatctccccccttgtgggggagatgcccggaagggcagaggggggtatcatttgcgccgaccgaagcaccaaaccgaaaacgagagcccgccttggcagtctacaccgatatctccgaagacgatctgaagtggttcctgacggaatatgacgccggcacgctgttgtcctacaagggcatcgccgagggcgtcgaaaacagcaacttcctgctgcatacctcgaaggacccgctgatcctgacgctctatgaaaagcgcgtcgagaaaaacgacctgccgttcttcctcggtctcatgcaacatctttccgcccgtggcctgtcctgcccgctgccgctgccgcgcagggatggcgcgctgctcggccagctgtcggaccgccccgcagccctcatctccttcctcgaaggcatgtggctgcgcaagcccgaggccaaacattgccgcgaagtcggcaaggcgctggcccgcatgcacatcgccggcgaaggtttcgacctcaagcgcccgaacgcgctctccgtcgatggctggcaggtgctgtgggacaaggcgcaagcccgcgccgacgaggtcgagaagggcctgcaggcggaaatccgtggcgagcttgattatctcgccgcgcactggccgaaggatctcccctccggcgtcatccacgccgatctcttccccgacaacgtcttcttcctcggcgacgacctctcgggcctgatcgatttctatttcgcctgcaacgatctgctcgcctacgacgtctcgatcatcctcaacgcctggtgcttcgaaaaggacggcgcctacaacatcaccaagggcatggcgatgctcgaaggctataccagcgtgcggccgctgagcgacgccgaactggccgccctcccaaccctcgcgcgcggctcggcgctgcgcttcttcctgacccgcctctacgactggctgatgacgcccgagggcgcgctggtgacgaagaaggacccgctcgaatacctgcgcaagctgcgctttcaccggcagatcaagtccgccgccgaatacggactgaccccatgaagcacgtcgacatctataccgacggcgcctgctccggaaatcccggccccggcggctggggcgcggtgttgcgctatggcgaggtcgagaaggaactctgcggcggcgaggcggaaaccaccaacaaccgcatggaactgcttgccgccatctcggcgctgacggcgctgaaaagcgcctgcgaggtcgatctccacaccgacagcaaatacgtcatggacggcatctccaagtggatcttcggctggaagaagaacggctggaaaacggccgacaagaagccggtgaagaacggcgaactctggcaggcgctcgacgccgccaaccagcgccacaaggtcaagtggcactgggtcaagggccacgccggccacccggaaaacgaacgcgccgacgaactggcgcgaaagggcatggagccgttcaagaagcggtaggcttgcttggtctgtgagggcgcgagcggcccgccacgagtcccttctccccagcggggagaagatgccggcaggcagatgagggggccgcaagtgcggcgtccagtataatgatttcaaatagataacggtgagactggagccccctcatccgacccttcgggccaccttctccccaacggggagaagggaccagcggcggccgctcaccccgacaccgccagatacgccgaaatcgtcccgatcgacagcaccgtcgaggccagcaccacccgccccgtcaagctcgcctcccgcccataaaactccgccagcatgaacggcccggtccccgtcggcagcgccgccaagagaacgcaggtatgcaccgcaaccggcggcagcttgaggagcggcccggcgataacccatgtcaccaaaggctgcgcgatcagcttcagcccgacgagaatccccgccgtcgctgcccgctcggtcgcggcccccgccttcgacccggccagaaacagcccgagcgcgatcagcgcgcagggcgatgccgcgccgccgagaagcttcagaaacgcatccaccggcgccggcagcgcagcgcccgagaccatgaacaaagcgccgagaaccggcgcgatcaggagcgggtttttggcgagcgagaggaacgtcttgccggcgatatcgcgccgccgcgtctccgattgcagcccgctctcgatcagcacgatggcgacggcgaagagcacgcagacggtgacgatcgtcgcgatcagcgtcggcgccatgccgttgtcgccgacaacagaaagcaccagcggaaagccgacgaaccccgtattggcgtagctggcgttcaggctgtcgatcgccgcatccgccagatgccgccccccggccatccgccaccagagcgtcgcgcaaaagatgatggcgcagcccgatgtgaaggcgaggatgaagcccggctgccagatctgctcgagcctcgcattggccatgatgtcgaagagcagggccggcagcgccagataaaccaccagccggttcacctcgcgcgtcgcgttggggccgagcgcgccggtcctgcgggcgataaatccggtcaggatcagcgcgaagatggggagcacgatgaggagattggtcagcattgggggagggaactctggttgcaaagaccattgtctagcgcccgagaccaatataatccaatgtcgatactgtcgctgatcgatactccagaggtatgaaatggacacgcgccacatgcgctatttcgtggcgctcgccgagacgctgcacttcggccacgcggcggcgcgcatgaacatgagccagccgcccttcagccgccagatcgcttcgatcgagaagacgctcggcgcccgtctcttcgagcgcaattcccgcaacgtcgcgctgacggcggcgggccggcattttctcgaggagtgccgcgcggtgctcgcccatttcgacgccgcctgccgcgatgtgcagctggtcgcatccggcgtgaagggtgagctgaagctcggcttcatgatgaacgccgcctacagcgtcgtcccggcgctggtgcggctttactccgagaagcgccccgatgtccgcctcgtgctcgaggagcgcataccgacggatatcgaggagatgctgatcgaaggccgcctcgacgccgccgtcaccttcggcggcagtccggccacgcacctgcgcaccacgttgctcgcccgcgaccgcctgcgcctgatcgtgccgcgagatcaccgcctggccgagctcgacatcgccggcccagccgacctcgcccccgaacgcctgatcgccgcccccgcaagcgtaacgccgacgctccgcgacgccatccgcaactactgcgccaccccgggcgtcgtcccgcatttcgcgctggaaccccgcctgcagcacaccatcatccgcctcgtcgccgaaggcctgggcatcgcgctcatcccgcagtctttgtgcgcggatctggcggaagggctggtctcgcggccgatcatggatgcgccggagttcgacatcgtgctctgcgcttcggctgcgtcgagcaatccggcggtgccggcgctgttcgaggtggcggataggttgggtggagtggggagacgcgccgagggagcttgattaagcagctaactgagcgccagcggccccctcatctgcctgccggcatcttctccccgatggggagaagggaatcgtggcctgcctcttactccccctcttggatgatcaaaatatgagatagttgtttctgccgggcgggtgg

SEQ ID NO: 56 - DNA, 11043 bp, Rhizobium matallidurans
  source 1..11043: mol_type = genomic DNA
taaggaatttcatggggtgcgtcgcggagccatttcgagcccgctccgcgacatcccgaatatcgggtcaatccaccgcccggcatcgcccacgagccattatccgcaaccaagacgcccgattttcggaaccgaaccccgctcccatgtgtttctggacgtgtttctatcgtcagcaacaaaggagacagcccgatggcttccaatacagatgatgtgagatccgccgttagcaaggacatcagcgccctgcagcaggaggtcgcccgtctgcagaagatgatctcggcccagggcgcggaggcctattacgaagtgcgcgaccgcgccggcaaggcctacgaagaagtcgcaccccgcgccaagaccgccgttgcccagatcaaggccgaaagcgtggccgcggccgacgccgcgcgcgagcatcccgccgcaaccaccacggcgctggcactcgccggcgcgctcggctttctcgccggctatctgctgagcggcgccgcccaggctgcgccgcagcgtcagcagtggtggcggtagcattcgttaaaattagatttatctaatttgtttacgggccggacgatccgaagtatcatccggcccgtactactttggtcttagaaaaacccatttttcgggccagtaatggagactataaagaacgagggaggactgctgatgattgccaagggatcgaactgcatcgtcgaagtcaccgtggacggagcgcagggccgcctggcggtcggtatcatgaacatgcgacaggctctcgaacttcctgaaatgcccagcgcatcctatacccatccggaccccgccaaggcggctgccggcgtcaccatgaaccgcgagcagcttgcgggtttcatggcgcgtcactgaggagcggtcgccaccgcgatccgttcatgtcatatagatgcggccaagatatatgaatgcggcaaagacaggcggcgcccatggcgccgcctcttctttttcaccgtccgccagcgcccctccccttcatcttatccccgcgttttgcgaccccgcgtctggcatcccttgatcgttcatgccagaaacgccgttgaccgagcaggagaggaacgggcgattgagagagcggcgcgcaccgcaaaggcagaacggccgtacgaaaccgggcgccgccgagagcaagcgggtgaccctgccccgcgcattgtccaagctcggctactgctcccgaacccaggctgaaaagctaatcgccgacggacgcgtgaccgtcaacggccgtacggtgctggacagcgccgcctggatcgacctctcgtccgcaacgatcgcggtcgatggcagcgatgtcgccgccgagccgatgacctatctgatgctcaacaagccgcgcgggctggtgaccacacgccacgatccggaaggtcgcccgacggtgttcgattgcctgaaggatgtcgacaccccgcatctgtcgcccgtcggcaggctggacaaggcaagcgagggcctgcttctcttcactaatgacacggttttcgcccaggcgctgctcgatccggtcacccatgtcaccaagacctatcacgtgcaggtcgatcgcgtcatggagcccgacatgctggccgagatggcctatggcgttcgccacgacggcgaactcctgaaggcgacagcggccacgctcttgagacaaggcgagcgcaattcctggatagaagtcgagctggatgagggccgcaaccgccagatccgccgcatgctggaggcgctcggcaccgaatgcctgcggctggtgcgcgtggcgatcggcgatctgaagctcggcgatctgccgaaaggcgcggtgcgggcgctgacggaggccgagctcaaggcgctgcgccgccgcgccggcatggaaaccaccaaacggaccagatgacatcatgacagacagcgccgccctcgccccgcacgatttctggcaggagctgcacgcgccgggcaccttcgcggtcggcgacgacttcacatccttctatgtcgcgacgctgcccgatggtcgccagctcaggctgccgctccgcccgcttgccgatggcgaccatgcgctcgcctcgctcatcatcaaccaggcgagcttcgaggtggtggacgcgctggcagcgcagctcgcggacaggctgagagccctcgatatcgaggtcgtcgccggactgccgacgctcgggctgacgctcgcctcagccgtggcgcaaaaactcgggcacaccagatatgtgccgctcggcacctcgagaaaattctggtaccgcgacgagctctccgtcccgctgtcgtcgatcacgacccccaaccagcagaagcgcctctatatcgacccgcgcatgctgcctttgctcgaaaaccggcgcgtcgcgctgatcgacgatgtgatttcaagcggcacctcgatcgtctcgggcctcgagctgctgtcggcctgttcgatcgaacccctggcgatcggcgccgccatgctgcaatccgagcgctggcgcgccgcgcttgacgaagccgggccgcgatggctggagcgcaccttcgccgtcttcgcgaccccgatgctagaccgcaccgaacgcggcacatggcgcgcgccgaggatctgagccacagcgaccatgatgaagcgcgctttacgaccggccctctatacagcgcgtcgcgaaccgctacattcccccataagcgtatcaatccggaagacctgatgaccccagaacaagcatggctgctgatccttttgatcgcgatgctggttctgttcctgatcgaccgtttcagggtcgaggtcgtcgcgatagcgggactgcttgccggctatgcgctcgggctctatccaacggaagcagtcttttcgggtttcgccagccccgtcgtcatcaccgtcgtcgagatcctgctggtggtccaggtgcttgcccgcacccgcttcttcgacagggtatcgacggcacttgccggccgcggcatgcgcggcaccggcgtcatcgccatcctgtccggcgtgaccggcttcatctccatcttcatgaacaatatcggcgccttctccatttcgctgccggtggcgttgcgcatcagctccgtgaccgccatccccaagcggcagctgatcatgccgatctcgttcgccgcccttttcggcggcctcgtatcgctgatcggcacgcccgccaacctgctcgtcagcaacgcgcttgtggcggcgaccggccagggctttcgcctgttcgatttcgcctatgtcggcctgccggtcgccatcaccggcatcctcatgacatcgatgctggcgccgcttctcttccccagggatggcgatgacgacaaggcggcgcccgaaacgccgcgacgccgcatggtggccgaacggcgcgtaccggccggctcgcccctcatcgggcagaacctcgccgaccttcccgcccgcttcgcgctcaagccgcatgcgctgctgcgcaatggcgccttcgtcttcggctccgccgatcgcgcaatcgtcgaggccggcgatctgctgctggccgaagccgacgacgcggtccttgccgatttcgccgcatccggcgcgctgcagaccgatcactggcaggccggtcattggcaggccgaggcaagccgcgtcgaagccgtcgtcatgccggagagcacgctggtcggctcgcgcctgcgttcgctcgaggtcttttccaccagaaatatcgcgatcagcgcgctatccatgcgttctccccgcatcgagggacgcttcgaggatctgcagctgtcgatcggcgacgtcctcgttctcgagggcgaccgcgccgcgatcgccgaggcgctcgaggaatgcgaatgtctgccgctcgcctccccgcccgtcccgccgtccgtctcgctgagctggcaacccttcgcgatctttgcctgcggcatcgccgcgacgacggtgttgcggcccgatatcgcgctcgccggcgtcgtcctcgtgctggcgctgttgaactacctcaacattcgccaggcgatggccgacctgaactggcccgtcatcatcatgctcgccgcgatgatcccgatcggctcggccgtcggcacgtcggggaccgccgaggtcatcgcatcggcgctcggcacgatccttcccgtgtcgcaaccgctggcgggcatcgccgtggtgctgtttctcgccatcgcgctgacgccgttcatcaacaacgccacggtcgccatcattctcagccccatcgccatcgaattcgcggcagccggtgagcaccagccgcaagcctatctgctggccgtcgccctcggtgcctcgctcgatttcctcacgcccttcggccatcacaacaacacgctcgccatgggcatcggcagctatcgcttttccgatttcatccgcgccggcctgccggtcaccgtgctgagctactttttgagcctgctgcttctatatgtcttctgggtttgagccccgcttgcttgacatcgccggcaatggaactagagcagggacaaccccgatgaactgatcccgttaaccgacaaggacggtcaagcccgtgcgtatcctctcagaagcccatttcccggaactgccgaattactaccgcggcaaggtacgcgaaaattacgaccttcccgatggcagccgcatcatcatcagcaccgacaggctgagcgcgtttgaccggatcctgacctgcatcccctacaagggccaggtcctcacccagacggcgcgctactggttcgaggcgaccaaggatatctgccccaaccacgtcatcgcctatcccgatccgaacgtcgtcgtcggcaagcgcctcgacatcctgccggtcgaggtcgtcgtgcgcggctatctggccggaaccaccggcacctcgatcctcacgctctacaagaagggcgagcgcgagatgtacggcatgcgcctgccggacggaatgcgcgacaatcagaagcttcccgagccggtcatcacgccgacaagcaaggaattcgacggcggccatgacgagcccctgacacccgcgcagatcgtcgacaatgggctgctgacgcaggcgcagtgggatacgctgtcgagatacgcgctcgcgctctttgcccgcggccaggaaatggcggcccagcgcggcctcatcctcgtcgacaccaagtacgagttcggcaccgacgaaaacggcaccatcattctcgccgacgagatccatacccccgacagcagccgctactggctggccgacagctaccaggcgagcttcgaggccggcacgcgcccggcaagcttcgacaaggatttcgtgcgcgcctgggtggccgaacgctgcgacccctacaaggacgagatccccgagatcccgaccgatctcatcgagcagacctcggccgtctatataaaggcctatgaggcgatcaccgcgcaggcgttcgtgcccgacgacggcggcgcgaccccagtggagcgcgtgcgccggaacctgtcacgctacttcccgtaagcactcgatcgcatggaggcctgcggccatggcttgcaggccctttcaatgtcgcgttaggttctgaaaaacagcgatgccggacgcaaccggctggagaactcatggcacgaaggccaaggcgcaaggccgaagagacccgcgaagatatcctgtcgatggccgagcagctgtttcgccagcgcggcttcgtcgccgtctccatcgccgacatcgccgcctcgctcggcatgtcgccggccaacgtcttcaagcattttcattccaagaccgcgctggtcgacgcgattgccgagcggcacctgagcgatgtcgccgaccgcttcgtcgccgaagacctgccgccgcgcgaacagttgctccgcttcgtgctcaggctcctcgacagccatctcgaggatatccagaaaaacccctacatcttcgaaatggtcctcgtcagcatcgacgccaagatcgaggccggacggcgatatcgcgaaaaggtgatccagaagctggcggccatcattcgcgagggtgtcgcggaaggccgctatcactgcgcggacccggcgcgagccgcgattaccgtctccgacgtgcttgcgggcgtgctgcacccggttctcatcgtcaaggacgacaaggagacccttgtcgagagagcaaggcagatcgtcgatttcgccgataccgcactgcaaaatagcgcttgctaagtgacgattcataacttacgtcactttctaaaggctttgttaattcggatcagaggcatttgactccggatcgtttgtcgtgtggcatccccggcaggcttcgatccgcgagcccgcgcatagggaattgaacatgatacgtcgctttctcctcgtttcctccgctctcgcgatcggcggcgtgctcgccgcctgcagcgacagcggcaagacacccgccgctggcggcgccggcgctgccggggcgcagcagcaggcggctgccgtcggcgtgatcacgctgaagaagggcgacttcccgatcaccaccatccttcccggccgtgccgaggccttccagaccgccgacatccgcccgcaggtcagcggcatcatccgcgagatcaccttccgcgaaggcggagaggtgaagaagggcgacgtcctctaccagatcgaggacgccccctatttggccgcggtcgcccaggcgcgcgccaccatcgccaaggccgaagccagcgtgccgagcgcgcagagcaacttcgaccgctatcagcgtctggtcggctccggcgccacgcagatcgaattcgaaaccgccaagaccaacctcctgcaggcgcaggccgaggtcgaatcggcgaaggcggcccttgccgcggccgagatcgacctcaaccacaccaagatcgtcgctcccttcgacggcatcatcgaccagacggcctacaatgtcggcaacgtcgtggccgcgaaccagaccacggcgctgaccaccgtccgccagatcgacccggcctatatcctgctgacggaatcgagcaccaacctgctgcgtctgcgcagcgccatcgccgctggcgagatcaagggcacaggcggcaacgacgcgttccggctgatcctcgaaaacggcaaggaatacggtgagagggggacgctcgacatgtcgaagtccgtcgtcagcgagacgacaggcaccttcaccatccgcgtccgcttccccaaccccgaccgcatcatcctgcccggcatgtatgtccgcgcgacgctggaactcggctcggaaagcggtttcgcccttccccagctcgcgaccagccgcaacgccaatggcgagctgtcggcgcagttcgtgtccgctgatggcaaggtcgaaaaccgcaccttcgaaaatgcatcgccctccaacaacgcatggctggtgaccgaaggcatcaaggatggcgatcagctgatcgtctccggcctgcagtcgatcaccgccggcatgccggtcaagccgaccgagatgaagatcaatgacaagggtatcgtcgtgcccgtggcgcctcccgccgccggcgacgcgcagcagcccgccgcgaagtaacgcgtcgatcattgatccgagccgtacaggaattagccaatggccaagtttttcatccgacgcccgatctttgcgtgggtcatagcgatctcgatcatgcttgcgggcgtgctggcgatcttcacgctgtccatctcgcagtaccctgatatcgcgccgaccacggtgcgcatcaacgccacctatcccggcgccagcgccgaaacggtggagaaatcggtgacgacgatcatcgaggacggcatgaccggcctcgacgacctcacctacatgacctcgacctcgtcgaccggttcggccagcatctcgctgaccttcggcacgacggccgatcccgacatcgcccaggtgcaggtgcagaacaagctgcagctggtgcaatcgaagctgccgggcgacgtcatcgacgccggcatcagcgtcacccggtcgacctcgagtatcctgctcgtcggcgccctggtatccaccgacggcaagcgcaattccgtcgatctcggcaacatcctgtcgaactcgatcgaaaagcaggtacagcgtctggaaggcgtcggcagcgtcaatatctttggctccggctacgccatgcgcgtctggctcgacccctacaagctggtcaagtatcagctgacgacgggcgacgtgacctcggcgatcgaggcgcagaacacccaggtatccgtgggttcgctcggcgcacagccctccgtcgacggccagcagatcaacgtcaccatcaccgcgcagagccagctgaccaccgtttccgacttcgagcacatcatcctgaaggtcgaaaaggacggatcgacggtgcgcctcagcgacgtcgcacgcatcgagatcggccaggaaagctacggcggctcctcccgctacaatgcccagccatcgagcggcttcgccgtcaacctcgcgatcggcgccaacgccatcgacaccgccggccgtgtccgcgccgcgctggacacgatctccacgggcctgcccgagggcgtggaaatcacctacccgtatgacacgacgccgttcgtgcagctgtcgatcgaaaaggtcgtgcgcacgctggtcgaagcgatcgtgctcgtcttcgtcgttcttctcgtctttttgcagaatttcagggcgacgctcattccgaccatcgcggtccccgtggtgcttttgggaaccttcggcatccttgccgcgacagggtattcgatcaacaccttgaccatgttcgccatggtgctcgccatcggcctgctcgtcgacgacgccatcgtcgtggtcgagaacgtcgagcgcatcatgaccgaggagaagctgtcgccgatggaggccaccgagaaatcgatgggcgagatcaccggcgccatcgtcggcatcgcgcttgttctgacggcggtcttcattccgatggccttcttcggcggctcgaccggcatcatctaccgccagttctcgatcaccatcgtttcggcgatgctgctctcggcgctcgtcgccatcgtgctcaccccggcgctctgcgccacgatgctgaagccggtgcatgaccagaagaagaaccgtgccggcgagtggttcaaccgcaacttcacccgctccaccaacggctatgtccgctccatcggctacctcttgaagcggccgtggcgcgtcatgatcgtcttcgtgctgatcggtgtcggctgcgcctatttcttcaaccgcctgcccacctccttcctgccgcaggaagaccagggcgtgcttctgacgatcgtcaccacgcctccgggctcgacgacgcagcagacccaggccgtcgtcgaaaaggtcgagaaatactatcgtgaaaacgaaaaggacgccgtgcagtccgtcttcggtgccctcggcttcggcttcaacggctccggccagaacagcgcgatcgtcttcaccaagctcaaggacttcgcggaacgcacggacgtcaacctgcatgcccagtcggtcgccacgcgtgcgctcggcgccttctcgcagatccgcgaagcccaggtcttcgcactgctgccgccggccatccagggtctcggcgtatccagcggtttctccatgtatctggtcgataccggcggcaacggcaccgaagcgctcgacgctgcttccaagcgcctgatcggcatggccaataccagtggcaaggtcgtggcgttgcgcagcaacaacaaggaagtcgagccgcagatgaagatcgtcatcgaccaggagaagatcggcgccatgggtgtcgacatctcggcggtcaatgcgatgctgtcggtcatcttcaccgggcgcgacgtcaacgacttcacgctgaacggcgagatcaagccggtctacgtccagggcgatgcggccttccgcatgcagcccaacgacctcgaccgctggtatgcccgcaacaccaatggcgagatggtgcccttctccgccttcacaagcaccgaatgggtcaagggcgctccgacgctcgcccgcttcaacgcggtgagcgccatcccgctcgacggcgcgtccgcgccgggcgtcagctccggtgacgccatgaacgcgatggaagagatgaccgcgcagctcggcggcggctacaccgtcgcctggcagggcatctcctatcaggagcgcctgtcgggctcgcaggccccgctgctctatgcgatctctattctcgtcgtcttcctgtgcctcgcggcactctacgaaagctggtcgatcccgttctcggtcatcatggccgttccggtcggcgtgctcggcgcgctggtggcggcaacgctcttcggccaggcaaacgacgtctacttcaaggtcgggttattgacgacgatcgggctcgcggcgaagaacgccatcctgatcgtcgaattcgccaaggatcgaatggaagccggactggggatcatcgaggcgacgctcgaggccgcgaggctgcgtctgcgcccgatcatcatgacctcgctggccttcatcctcggcgtcgtaccgctggccattgcaaccggcgcgggttccgccgcgcagaatgctatcggcatcggcgtgctcggcggcatgctgttcgccaccgcgctcggcattttcttcgtgccttcattctttgtggttatccgccgcgtcttctcgcgacgtcaaaaaaatgaggtatgagtgtgacatatctgcactgtgataaagtgagactcattggtacattgccgcggactgcttcgggatggtgtttctcgtttgagcgaagcgcggccgatggtgaagcatgatcgcttctgacatgaatgaattttttggtcgagttacaggaagatagttaatggcgtcttttcgttttgccgctccggcatttttgctattgctcacgggctgtgtgagtggcccggaccatgttcccccggagatgcctcttccggcgaagttcaatgagggcgcggccaagcccgatggcgacgtctcgacggttgcctggtggaccgcctatcgcgacacgcga

SEQ ID NO: 57 - DNA, 10283 bp, Rhizobium matallidurans
  source 1..10283: mol_type = genomic DNA
gcatgaatatgagccgtggtgacttatgttcacctcaggctggggggccatcagcgcgaggagctttggccgagcggcatgaacataatcttggtaatgaggagcgcggggcgacgctggcggcgagatctcgcgtgcattgaaagcaaattggattggcaatcgcgttgctcctattcgatggaccaaggtattgtctggaaacagcaatatttgtagatggtggacgacaacaccacgacatcaggaagggttttcgcgtgccagagtgggatgactatgaggcaacgctaccgcctcctgcgtatgggaagacctgggagctaaaagaggtcttcacgatcatgcatgtccgtgaagcagtccgtacgatcgatgataagaagatttccgcccggcttgtatatgacgagagccgactgaatactgcaaggctccccgtcgtgtggtcgtcggccaatcattggcatcgcggatcgatgtatgggacggtaggctttcatttcaaatgggaagaactcatcgctggaaagaacttctactggatcgaagcaatcgaagcctacaacccgaccgccttccgtatattgatttgtgacccggcgttgacgcctccgcccgcagcatccactccttacgatccgcacagggacaaaggcccgctgcgcttttggaacggtacctggtactggaatgggacttacacgtcggagttcatgtacgctgacgatcttagccttgaacgtctatcgggattttctttcttcaaacaccacgatactctatgccgatacgaaggaagcgcatgcggcgagcgcgcgcagcatcaaagcaagaccggtgcaattattctcgcgcacgtacttgccaatgaccatcatggtatcgacggctacctcaagcattcggaggtacccaactcggtcggtatgtcacttcagttcgcagtgtccggtcttcagctcatctttgacaagcctgcacgtttttctcagaacaaggtgccgacgacgtatgcaaatcgcattctgcttggagcgttctcgcttcttgcttccggccagaaagaggctgcacagcagcttgtttggcaatccatgacgcataaaaagtttgagaaagctttctttagcctgatcttagcacatttcgatctgcctccggacgcatttaaataacggcaagtccgcttgacttcctaaaaatatctattattctggatatatggaaatcatcactgcaataacggccctttcggccttagctcagaacacgcgcctcgagacgtttcgtctactcgtgcggcacgaacccgacggtattccggcaggcgaactcgcccggctgctcgaggtcccgcagaacaccatgtcggcgcacctcgctacacttttccgtgccggtttggttaagagcgagcgccagagccgatcaatcatctatcgggccgacctcgacggtctgcgcgacctgacactttttctgctgaaggactgctgcggcggatcgacagagctttgcacacccctcatcgcggagttgacgctctgctgcgctccggaggcgaagcgatgttaagcgcgatcacattactcgaagtgcgcggcagcaatgcccgtctccgcgaagcgctgcacgccgcagatcttccgaccgatgacatcgaagatggaggccgcaccttctttgaagccgtttcgggtggcgacgagattgtcggctatgccggcctcgaacagtgcagcggtgattacctgctgcggtccgttgtagtgctgccggcgcatcgcggtcgtgggtttggccgagcgatcgttgaggcaacgttgcgaggtctcgatgtaaacggcggcatctatctcgcgacgacgagtgccgcgccatttttttcgaccatcggtttctctgaggtgtcgcgggccattgtacctgcggctgtgctcatgacccgccaactttctttcatctgcccatcgactgcgaccatcatgaagctcaacaggtccccgacctaacaacggaacaagaccatgaccgacaagatctacaacgtgctcttcctgtgcacgggcaattccgcacgttctattctcggcgaatccatcctgaatcatgaggggaaaggtcgctttcgagcctactccgcggggagccatccgaagggcgaggtgaacccccatgcgatcaaggagctggaagcgctcggctatccgtctaccggtttctcctcgaagaactgggatgtgttcgcggagccgggcgcgccgcagatggatttcatcttcactgtctgcgacagcgcggctggtgaagcatgccctgtctggctggggcatccaatgacggcgcactggggtgtcgaggatccggccgcagtcgtgggaacggatatcgaagtccagagagctttcgcacaggccgcccgttttctgaagaaccgcatcggcgccttcctaagccttccactgtcttcgatcgacaagcttgcgcttgagcagaagctaaagcagatcggccagatggaagggtcgaccagcagccaggaaaagagcgcctgatgtccgcgttcgaacgctatctcactgtctgggtcttcctctgcattctcgtcggcatcgcgctcggtcatctgatgccgagcgttttccaaacgatcggcgcagccgagatcgccaaggtgaacattcccgtcgccgtgctgatctggctgatggtcatcccgatgcttctcaagatcgacttcggctcactgtcgaaggtcggtagctattggcgcggcatcggcgtgacgctgttcatcaactgggccgtcaagccgttctcgatggcgctgttgggctggctgttcgtgggctggctgttccggccatacctgcctgccgaccagatcgactcctacatcgcgggcctgatcatcctcgcggccgcgccctgcacggctatggtgttcgtctggagcaacctgacgaagggcgaacctcatttcaccctgtcccaggtcgcactcaacgacgctatcatgattgtcgccttcgcaccgatcgtgggtctgcttctgggtctgtctgcgatcacagtgccgtgggacaccctcatgatctcagtggccctctacatcctgattccggtcgcgatctctcaggttctaaggcgtgccctgctggccggcgggagcaccgccgggttggaccggctgttgtccaagcttcagccgctgtcgcttgtcgcattgctggcgacgctggtgttgctgtttggcttccagggcgagcagatcattgcgcagcctacgatcatcgcacttctggcagtgccgatcctgatccaggtctatttcaactccggcctcgcttacatcctcaatcggatttcaggcgagcagcattgtgtggctggcccctcggcacttatcggggcctctaacttcttcgagctcgcggtcgccgccgccatcagcctgttcgggtttcagtcgggcgcggcacttgccacagtggtcggtgtactgatcgaggtgccggtgatgctttcagtcgtctggatcgtgaaccgctcaaagggctggtacgaggcatcgcccgccgtttcccgcaacaccatcaccgaaaggacctgactatggacgccaccatctatcacaatccggcctgcgggacgtctcgcaacacgttggcactgatccgcgcagccgggatcgagcctactgtcatcgaataccttcagaacccgccatcgcgtgagcagctctcgaagatgattagggacgccggtctgactgttcgtgacgcgatccgcgagaagggcactccttatgccgaactcggtctcgacaatccggacctgaccgaagaccagttgctggacgcgatgctcgcgaccccgatcctgatcaatcgaccatttgtcgtcacggcgctcggcaccaagcttgcccgcccgtcagaggtagtactcgacatcctgccgaccgatgccttcaaaggttcgttcaccaaggaagacggcgaacaggttctggatcaggaaggaaagcgtattgtctgataccttccccgcactgcacgaccagcttcttcagcccatcgagccggaatcgctccggccgatgttctcgacacataagcccaggatcttgattctctacggttccctgcgggaggtttcctatagccgtctgcttgccttcgaagttcgtcggcttctcgaacggctgggatgcgaggttcgcgtgttcgatcccgccgggttgccgcttccggacgaatctccggtgagccaccccaaggtgcaggagctccgcgaactgacccagtggtctgaaggccacatctggatcagcccggaacgccacggtgccatgaccgggataatgaagtcccaaatcgactggatcccgctctcggtcggttccgtccggccgacgcaaggcaagacgctggcggtgatggaagtatccggtggcagtcagtccttcaacgccgtcaatcaattgcgcattcttggccgctggatgcgaatgatcaccatccccaaccagtcgtccgtcgccaaggcgtttcaggaattcgatgccgaaggacgaatgaagccgtcgtcctattacgaccgcgtcgtggacgtctgcgaagagctggtgaagttcactatcctcacccgcgatgtttcgtcctatctcaccgatcgctacagcgagcggaaggaagacgcagccgagctggagaagcgggtttcgctgaagtcgatctagtaattctagacagttgcggtggctggtcgccgacaggatactgccaccgcaacgaatgccgctatgctgaccgcgccgagacacgcgtttccaatgagcgacaagctcaggcccaggttctccatggccgccgcgaacgcgaaaggtgctccggctccgagcgccagtcgagccgccgccatcttgcctgtgatcgctccatatccgtccgatccgaatagatagagcggcaaactcccctgcgcgatgctgttgattccggagccaagccccaggcagatggcgaaggcgaccgcacccggcagccagttccccgtcaccagcaggatcaggacgccgaagacgatcagcacggcggcaagtacggcaagtcccggcggcgacaggttcttcccgaagaccatgttgatcaggcggctcagaacctgcgcaggaccgaacagtgaaccgataacgacggcggctgcccccaacccgatcgagccgagcatcggcaccatatgggcaaggatggccgcgagcgtaaagccgaggagcgcgaaggccaacgagacgatgaccatggcgcggcgccttgcatgaggtgcgatcgcgccgatcaccgtttcgcgtgtccggatggtcgtttcgccagcattctgtccgagactccggatccagaagtgcagcggcatgcaaaggaagaggttcagcgccgcaaagacgagatagatttcccgccacgagagatatcccgtaagtgctgacgagatcggccagaagattgtcgaggcaaatccaccaatcagcgtaagataggtaatgctgcgggaagcgctgcggggatcgctttcaaccagagctgcgaatgcagcctgatactgcaccattcccgatgacacctcgagcaggatgatggcgatggcgaagattgcgactgagggcgaccaggcgcaaagggcaagtgtcaatgccgcgagcgctgaccctgccgtcatgatcgtcgcggcaccgatccggtccatctgcttgccgatataggtggccgacagaccgccgataaacagggacacggagaacacaccgaatacctctgccagcgataagccgagatcctccgccatgccgggggcgaggatgctgaagctgtagtagagcgtgccgtaaccgatgatctgcgtcaggccgagagccgagacaatgcctgcagggattgtggaactacgcaacgacgtcatccttgccggctgggctacagcagtcgccgccacgctcgacactctctctgatcacctgatgaccagcgcaacagtcctccatcaggaatttgacgagatcggcaagcgcgtcgtaactcgcgttgtagatgattgagcgggactcccttcgctgggagatcaatcctgaccgctccagttccttcaaatggaaggagacgttcgtcgcggagacgcccatgcgttcggcgatcacacctgcggccaatccctccgggcccgcaatgaccagagcacggacgatcgcaaggcgggtctcctgggacagcgccgcgaatgacgaaagagcttgacgttcatccatatttcaacaatccttgaactattggatagagggataacgcacatgaacgcgatcgacaagacaatttcgacagacatcagtctcgcccatctcctcgatgtcctcgccgtggctccagatgcgccgctggtgttcagctatgacggcaataccgtacgtgcgggctaccacgtcaccgaagtcaaggccgggattttttcggcgctcgattgcggcgccaacccggaagcctgggcagagatcttcgtgcagctctgggatatcgacgaagatgaccggacgcatatgccggccggcaagttcgcggcgatcatccgcaaagtctccgaccatgtgcagcttgagccgactgcaaaactcacgttcgagatcagcgacggagagcggccgatggccctctactgcgcgtcagcaccgcggctcgtcgccggcaccttcgaggtgtctcttgtcgctcgaccagcaagctgcaagccgcgggatcgctggctggcggaggagcaggccaaatcgtcctgctgcgggccagctagcacgacgtcgaagtgctgcgcctagcctcccggctggggtgcgctcccgggcgtcacgccgggagcaacgagcttaaagcgcttggaggaatgccatcaacttgtcgggcggccggtagcgaacacctgtcgggctgaccggctgaagccggctgagcgcttcttccttcatcgcaaggtcagcctccatgtagatatgcgtcgtgctgatgtcctcgtgtccgagccaaagcgcgatcacggtcaggtcgacgccggactgcagcagatgcatcgccgtggtgtgtcggaaggtatgcggcgatatcgcctttgccaggatcgatggaacacctccgccggcagcgccgacggcgaggtcgaggcgctgcctcacactggaacgggataggcgcgtccccgaactgttgggaaagatgtaggcatccggtccacaatcatgaagatcctgaatccatcgcttcagcgttcgtgcggtctcattccagagtggcacgctccggcgcttgcgccccttcccatgcaggtgcacgaccggtgcagtctccagaatgacactgccaatccgaaggtcgatagcctcggacacacgcgcgccagtattatagaggaatgtaaacagtgcccggtcgcgcctgccggcccatgttttgggatcgggcgcgttgatgatcgcctcgacctcggggcgggccaggtagccgagaactgccttgtcatgccgcttctgcgggacggcgaggctgcgctcgatcaccgccagcgcagtcagatcctcatgcgcggcatatttgaggaagacccggattgcggacagccgtgcatttcggctcctgacgctgttggcccgatcacgctcgaggtgatccagaaaggccaggatcagatcggcattgaggtcgggcaaggtcaagttcgtcggggatttcccgatccgtttctcagcgaaggccagcaggagtttgaacgtgtctcggtatgccgcgacggtgcatgggctcaccgctcgttgctggcgcagatgatcaacgaagaagcgctgcagcaaggtcggaaaggaaggtgtggtatcactcatcgaagttgcctccaacgatagctgcaccttcgaaacgatggccggcaattgccataagctcgggcacgccctcgatataccagtaggtatcgcgcagattggcatggccgacataggtagacagcatcatcatcgccgcatcgatctccgttccgctttgctgccagaggataagccggcggcatatgaaggtgtgccgaaggtcatggatacgcacgaaggaatggccaccgcgcggccggattcccaatctctgggtgatccggaaccaggcgtgccaagcgttcatgtagctcagcttcttgctggacagctcgctcatgaagactggatcggccggtctcgatgggaataacgcgtttcgtcgatcaaggaaggtctcgagcgcggcaacagcggttggatggagggggaccagtcgctggcggccatatttcgcttcccgcaccaggatctgcgaagcttcgagatccagatctcggatctgtaggccgagcgcttcggatatacgcagcccagtcgaggccagcaggccgatcagggcaggcatcatgagcgtcccggcagcctgaacgcggcgaatgtgatgcgcttcggcgatgatggccacgatttcctcgttcgcgaagatatgtggagcaagccgacgcttcgtccgcccaaaaggattggtcgccgggaaggtggtttcacgatcctctgccgcgagaaaggccgcgaatggcctcaacacctccagtcgttttgcccaggtgaaagggtcggcaattgtcgctccggtcttcgcccagcggagcgcgatatcggacgagagcgccccttcgtgtcctctgtcgtcggcatatcgtgcaaaggaggtgatctgccttgccggagttttcatcttgaagccgaggcttcggcgatgtgcgaggtaggcctcggcacgagatagcatagtggctgacccggtcatgcgctcgctcccggccaaggcagggctacggccgccagcctgttttgatcgacgcgggcgtagcccgcagtcgtcaccacgctcatatgccgcatgatgtccgcaacctgcttcaggggcacggcatcgttgaccagtcgactggcaatcgtatggcggaagatatggatacgggtgcaatcccagcccaatcggtcgtagaccgcatagactgctcgctgtaccgagcgcggagtgatcggctctccaaggggcgcaacatgccggacgaagacttccctgtgttgcgtggcttgcctttcatgcacgatatagtcggcgatagcttcgcctgtagcatatggaagcggcataggatcggaccggcgcgacttggtcgagcgcacccggatcatacctttttcccaatcgatatcgtcgagtgtcaggctggttatctcgatcgaccgcatcccgaggtctgctaggcacctgataatggcatgaactctcttccgggttcggccgatttctgcagagacttccagcaatcgctccagctccgccgggctgaagcccgtttgcagtctggccggcgttttcactgcgggtgctggtatggcctttactagccgacggacatcgtcgcctaagagtgctcgatatcgaagatagcacctgatcgagacagagtagctgcggatggttgctggtttccgtccctgctcgccgagcacgaactgacgaatgtgcgagtggttgaggttggctatatcgacacggccatctttcacacatccgaccagaagcctcggaacaacattgcgatgcttacggcgtgaacccgcggacaagccccaaacttcttcgagcattttatcgaacgccaggacttcacgatctatcgccgcgaggttcatcggcgggatctcgcgaagtgccctcattctgacggcgaggttcaaagctcgacgcatagcctccacctccgtgcgcattttccaaaagcatgagcaggagcaaccattcgcgtgatccgtcaggaagctttcaatatgttcagtggtgaagctttccgtggcgacaccacgctcgaatagccaatagccaaagtgaaggacgactgcggtatattggcgcttgcgcctaacgtccaaatttcggcgctcgcattggtcatggaccattcgagcgagcggcgaaagaatattgtccgggtcttcggttcgaagacggaggtgcagtggggtcggcaatcgcgttctcctttttcgctgagttgcgactgcaggttgccttcattcggatgcccgacgctggggattgaaggctcaaagagctgattatgtacagttggaaagcggggatgccctataaagcagggcgatcgagcctgaggtgaccataagtcacaacggctcatattcatgc

SEQ ID NO: 58 - DNA, 8771 bp, Rhizobium matallidurans
  source 1..8771: mol_type = genomic DNA
aggcgacctccgggtcgccttttttgttttggtgatgtggcgcggcggtgcgatctggtgccaatcgtcatgcgatagacgaatgcgaagcctcacttgaaccgcagtctttccagcagccgcgcccaccgcgttcgcagggaagccggctcagcctggggtgccagcatgaaatcgggcaaaggcacgtttggcatgtcgtcataggctttgaggatggtttcgagcggcgtcagggtttggtcgcggtgccaatagacgatcttcaaccatgtggctgcgcgcgtatcttggccttgtcccaaccattcttcctcgagattggcctgcaacattcgccgcccggcctcatgcaggtcattgtcgtcaagccgcgcccgccccaactttttcaagcacagcgcataggcaaacgcccttggctttaacgttgccttgagcgatggcactttcggcttcaggtgtcgctcatattcttcgatcgcggtttcgtactgtccggcctgaaagctgaacgccatgaaatcatcgagaatgccgtaggtgagcagcattcctctgctatgcggcaggcctctggtttcctgaggaacgaaacgctggagcttgtaatcaaacttgtcgggacccagttccttggtaaagccggtccgcatgtattcaatttgtgcgtcctgcgcgattttccaggacgcttcgtcgtttcccttgccgtacatccactgaccaagggccttggcccagtgcagggtcacgcgatgcgaacaaggaaggggaccaaacctttcctcttcctttccctcgatggccttgtccaaccactcaagcgcacgtggaagaataggcgttgtttgctcgtcataacgcaccaggaaggcagagacggcagcgtgaatatcatatgcagcaatattgcccatcggcttcgcgggatcgtattcggtgcgaactacgaaggcgatagtcccaggcatcacctcatgcgttctgatgggattgaattttttcaaaattgtctccgtcaataacgactaaaataaaaaacttcgccgtgcatctgatcatctcacaaagggtggtgcggcgaatgcggtgcgactagggctcgatcctttgaggtgcggcggcgatggggcgcacgccataaaggccgcttgccggcagcggcatcccgatccagagcagaagcatcaggccgcctaccgcgcgcagccagatgttgccgcgcgcgcgtgaaaacgagatggacgccaggacttcccgcgcggcttcggcatcggctgccggaacgcgaagctcgatcccgccaagcgcggtcatgaagtggggaaccatcgtcgtgtgatgaagcgtgtgcgcaagcacccggataccggccgcctccagcgcgcagatggccgacgccgtttccgtcggaccgtaggcccagccggcggtggcgaaatccgaaggacgggatgtcatgctggctccgtggcgacgaccgttgtgacgccgggatagcaggtctgtgttaatgcaatcaaaaggcgcatttggtcggtgggtgagggtgtggcgaagacccctccccacccccccccacaagggggaggggcttgctgggcgcggtgccggtggcaaacgcaacctcgcgacagtctcaaggccaatgacttggcacgggcgtgccacgggttagcccctcccccttgtggggaggggttggggaggggtcttgcggaaagtcggaagcagacctccccctactccgcgatctccggctcgatcagccgcgccatgttgcgcagcgattcctgccagccgagatagcaggcttccggcgggatgaggtcggggatgccggcctgggtgatgttgatctcggtgccgacggagaccttcttcagttcgaccgtcacctccatctcgcccggcaggttggggtcgtcgaagcggtcgacatagcgcacgcgttcgccgggcacgagttcgagatactccccgccgaaggaatggctgttgccggtcgtgaagttgcggaacgacatcttgaaggtgccgccgacggtcggctcgaaatgatggacgctgcaggtaaagccgttcggcggcagccacttggccatcgcgtcggcttcgacaaaggcgcggtagaccttctcgggcctggtggcgagaacgcggtgcaggcggatggtgcttggcatggggtgttcctcctgggttgatgcgatgggttggaccctaaggacgggcaagcggtgggtgatccgacatccgattgggattttgttcaaggggggagatggccagtgttgtgccgcgcggccccctcatcgcctcgctgcgctccggcacttctccccgctggggcgaaggggctggtggctggcggtgtgcgcccctcaccaagcctatagtgttttgttttggtcgggacagcgcggcatctccccttctccccagcggggagaaggtgccggcaggcggatgagggggctgcgggcgccgaccgtgccgtagcgcctgtcatgccccaaacctccccatttttaaaccaccattcctgatttcccccgtcctcgcgcgccaatccccttgccagcggctttgcaattatgacaggttccgcgagcgctatttggggagatatttcatgttgtttcgtcgcaccgtccttgccggactgaccgcacttattctttcgccgctcgccgccaccgccgccgagcttcccgatctcaagggcaagacggtcgtcgtcgtcaccgagaacgcctatccgccgctgcagttcgtcgatccgaagacgggcaagcagatcggctgggaatatgatgcgatgaacgagatcgccaagcggctgaacttcaaggtcgagtaccagaacaccagctgggacgcgatgatccaggcggtgtcggacaatcagtacaatatcggcatgaccgggatcaccatcaaggacgaccgcaaggccaaggtcgacttctccgatccctacatgcgctcgcagcagttcatgctggtgcgcggcgacgagacgcgctttaccgacgccaagaccttcggcgccttcaacgacggcctcgtcggcgcgcagccgggcacctcgcccttctatgccgccgtctacgagatcctcgacggcaacgagcagaacccgcgcatcaagctgttcgagaccttcggcgctaccgtgcaggcgctgaaagccggcgatgtcgacgtggtcttgaccgacagcgtcgcggcgcagggctatgtcgatgcgtcgaatggcggactgaaggtcatcggcgggccgctcggcaccgaggatttcggcttcatcttccccaagggctccgatctggtcggccctgtcaatgcggcgatcgcgagcctgaaggccgacggcattttcgacaagctcaacaagacatggttcctcgactacaagatgggtcaatgatcccgtctgtcgtaaccttctaccgcgcccggactgaagcatgatggctccgcagccaagccccgctggacgtcgatccggccaggagaagggcgactatccctggtggctggtcgcccttgtcgtgatcggccttacgctcgccgccgtcatcatcgccaacgacgtctacgcgcaggtgttccgcaccgtcttcaacggcgtcggcatcaccattttcgtgacgctcgtcggcttcgcgctggcgacgctgctcgggctcggcatagccctgctcgggctatcggacagcgtcgcgctgcgccagatcgcccgcttctatgtcgaggtcgtcagaggcatcccgatgctggtgcttctgttctacgtcgccttcgtcggcgcgccggccttcgtcgccgcctatagtttcctgaccgcgccgctggtcaatgccgggctggcggagccggtgctggtgcgcgatttctcgctgatgtggcgggcgatcatcgcgctgatgatcggctattcctccttcatcgccgaagtcttccgcgccggtatccagtcggtcgaccagggccagatcgaggccgccaaggcgctcggcctgtcgcgctaccatcgcttccgcttcgtggtctttccgcaggcgatcaaggtgatctttccgccgctgtcgaacgatttcgtggcgatggtgaaggatagttcgctggtctcggtgctcggcgtttccgacatcacgcagatgggcaagatctatgcgtccggctccttccgttttttcgaaacctattcgatcgtcacctatatctacctgatcctgacgatcggcctgtcgctcggcctgaggcagatcgagaaacggatgcgcgggcgcgaaggccgacgataaggcgcagggcgatgatgcgctgatgaatcgaattgccgagcatccgaaaaattggtaagtgactgctcatggaatccaagttcagttgcattggggcgcatattttcgtgttgcaggatcactaccgcctgccggcacgcttctttgcgaccgtttccggtgcgctcaacagccgacttcgttgatccctttctgatcgaccgacggccggtggcctatgcgccaccaagctccatacccccactgcaagcaaacgccctttgcataataacggatgtatcgccatgagcgcacctcgtaccctctacgacaagatctgggacgaccacctggtcgatcaacaggacgacggcacctgtcttctctacatcgaccgccacctggtccacgaagtcacctcgccgcaggccttcgaaggcctgcgcatgaccggccgcaaggtccgcgcgcctgaaaagacgctcgcggtcgtcgaccacaatgtgccgacctcgcccgatcgccatctcggcatcaagaacgaggaaagccgcatccaggtcgagcagctggcgatcaacgcggccgagttcggcgtcgaatattattcggcgagcgacaagcgccagggcatcgtccacatcatcggaccggagcagggcttcacgctgccgggcatgacgatcgtctgcggcgacagccacacctcgacgcacggcgccttcggctcgctggcgcacggcatcggcacgtccgaagtggagcacgtccttgccacccagacactgatccagaagaaggcgaagaacatgctggtgcaggtcgacggcgtgctgcccgctggcgtcaccgccaaggacatcgtgctcgccatcatcggcgaaatcggcaccgcgggcggcaccggctacgtcatcgaatatgccggcgaagccattcgcgcgctgtcgatggaaggccgcatgacgatctgcaacatgtcgatcgaaggcggcgcccgcgccggcctgatcgcgccggatgacgtcacctacgaatacatcaagggcaagccgcgcgcgccgaagggtgaaacgctcgaccaggcgatttcctactggaacacgctgaagtcggacgaaggtgcgcattacgaccgcgtcgtcacgctgaacgccgccgaactgccgccgatcgtctcctggggctcctcgcccgaggacgtcatctcggtgcagggaatcgttccgaatccggatgagatcgccgacgagaacaagcgtacctcgaagtggcgcgcgctcgactatatgggcctgaagccgggcacgaagatcaccgacatcgccgtcgatcgcgtcttcatcggctcgtgcaccaacggccgcatcgaggacctgcgcgccgccgccaaggtggtcgaaggcaagaccgttgccggcaccgtcagcgccatgatcgttccgggctccggcctcgtcaaggaacaggcggaagccgaaggcctcgacaagatcttcaaggccgccggtttcgactggcgcgagcctggctgttcgatgtgtctggccatgaacgacgaccgcctgaagccgggcgaacgttgcgcatcgacctccaaccgcaacttcgagggccgccagggcttcaagggccgcacccatctggtgtcgcccgccatggcggctgccgcggccatcgccggccacttcgtcgatatccgcgagtggaactgagattttccggcctctcccggtgacgggaggggccggatcgcatggattgcgatggacaggcttggccctaatcgggcagggcctgtcctttttcgtttgcggggttacactcccgccatcctcatccggagagcatcatgacatcggataccccgctcccgcgataccgtctgcttttgctgcgccacgccaaatccgcctggcccgatggcgttgacgaccatgatcgtccgctcggcggccggggcctcaaggcggcgcccgtgatggggcgctacatggcccgcgaggggctggttcccgatcttgcgctggtctccacggcgcggcgcacgcaggagacctgggcgctcgtcggcgccgagttgcctgatgatatcgcgcggcgggatgtggaggagatctacgaggcggcggcggagcggatcgctgcggttgttcgcggtgtcgatgcctcggttcgcacgcttctgatcgtcgggcataatccggggctgcaggagctggcgatcgatctcgttggagatcaggataggctcgccggggtcagcgagaaatttccgaccggggctctggcggtgattgacttcgccgtggcctggcgggatgtggccgctgggagtggcgtgttggagcggtttgtggtgccgcggtctttggtggggtgagtggttggggactctagctaacggtgcgcccggagccccctcatccgacccttcgggccaccttctcccctatggggcgaagggaagatggagcgcggggcccaccacgagtcccttctccccagcggggagaagatgccggcaggcagatgagggggctccgggctctgacacttaccacccgcaggggcgcacggcaaagcctcaccagctaaagccccctacgaccccgccttccccaaagccttctccatcgccggataaagcccctctttcaggctgatatcgtcgaacgggccgacgcgcttgtagaggatcgtcccatcgggggcgacgaggtagctttcggggatgccgtagacgccccagtcgatcgccgcctgccccttcggatcgacgccgatcgccttgtaggggttgccgagctcgccgagaaagccgagcgcgttgtcgttcttgtccttgtagttgatcgcaacgatgttaagccggctatcttttgccagttccttcaggatcggatgctcctggcggcagggaaggcaccaggaggcgaaaacgttgaccagcgtcagcttgccctggatggcggcgtcggtcagcggcggcacgttggagccctcgagcggcggcaggtcgagcgccggggccttggtgccgatcagcgccgaggggatatcggtgctgcttttgccgtgcacatcctggtcgtagagcatcttgcccgccgtgccggcgatgccggcgaagacgagaagcgggatcagcgcgaaaccgtagcggccgataccgcgccgttccttcggcgcctgcggccgggctgcggctgcggtgggttcggtgttcggcgcgtctgtcatgggctggccttgctgtgggatgcatccttggtccggctcgagcggcggcggatgccggaggcttcgagcgccttgagttcacggcggcgggcacggccctcgaaccatgtccagagcgtcacgccaatggtgaccgcgccggcgaagaggtaggaaccgtagacatagaaggcgtaggattgcgtcatcgccttaaccctcgcggcttgccaggcgcgcggcgaggcggcgctgggcggcaatccggcggcgccagatctcgttgcggatcgccatgacatgcagcgtcaggaacagcatggtaaaggcaagagccatgaccagcagcgggcgcaggaattccgggtcgatcgccgggccgtcgaggcgcagcacgctcgccgactgatgcagcgtgttccaccagtcgacggagaacttgatgatcgggatattgacgaagccgacgaggatgaggacggccgagaggcgcgcggccttgcccgggtcttccatggcgcgattgagcgcgatcaggccgagatacatcaggaacaggatgaagacggaggtcagcctcgcatcccagacccaccaggtcccccacatcggcttgccccagagcgagccggtgacgagcgcgatcagcgtgaaggcggcgcccaagggcgcggcggccctgaccgagacatcggccagcgggtggcgccagacgagcgtgccgatcgccgacaggctcatgatcgtgtagcccatcatcgacagccaggcggccggaacgtggatatacatgatgcggacggtttcgccctgctggtagtcgccctcggtcgtgaagctgagatacagccccacgatgaaacagagcgcggtgatgcctgccatccacggaatgaggcgcgcggcgagcgccaggaaccgcgtggggttggcgagatcgctgaatttggcgatggcaaggctattctcggtcatgccgtctccttagcgcgatccgccgttttcggcaatcaagccgatgatcaatccgatgtgttgcgcagcgccagtgccgccgccgccggcccgatgacggcgaagaacagggtgagcgcggatagaatcaggaagggcggcaggaagggggaatgcccctcgacggccgcgtaggtggcgctgacgccgaagatcagcaccgggatcgtcagcggcagcaccaggatcgacaccagcaggccgccgcgcggaagcgccacggcaaccgccgcgccgacc

SEQ ID NO: 59 - DNA, 7281 bp, Rhizobium matallidurans
  source 1..7281: mol_type = genomic DNA
cccgcttcgatgacgcgagggacggttcaaacatgggtcaattctcgatgataatattccgtgatcccgggtcagctctcagtgcaaatcaacaggctggtccactaacgacagactcgatctcgttgaacatgatccactacgtcgcgtagcaatgcttgaatccgagcacgagagaaggctcggcttatcagtgatcaagatagatcacctttggatcgagatatagtcagagttcctgtgatattatctttcgctgcgactttattcatctaagatctcctcgacatgaacctgggaggggaaaatgggaattgatacgctagccaaggtaccgcttctttatcattttacggatcgtcgcaacctgccgatcatcaaagaaatgggcggtctttatcccctttctcaactgcacgaaaagaacgtcgaagtgccagcacccggcggtaatgagtggagcagggatgccgacgctctaaaggggatgggcaacttcgtccacctttgctttcgcaatacccatccaatggagttcgtcgcacgccaagacgggcgcattacagataccattttcttgcaaatccacccgtcggtgatgcaattcgaaggggtacgcttcaccaacgacgtcgccaacaaggccggcgtcgagtccgtcgcaattgctgatgcagaaggtctcgttgactttgaaatcctgtatactaggacggattggaaagacaccgcgataaaggcgcgcctctcccaagcagagaaatatgaggtgctcgtgccccatatcataccgttagcctatataaggaacatctgacatggctgagagaccgatcttcattcccacggccgaagcggatggttacgttaagcgcgtcgacctcgaaattccgtgggcgggaggatttgccgaggtccagaaaaaaaagaatatccggtcgcttcacgaagcagcgaagaaagcaggctttacgccgctcctagaagtttccagcaagtcggatgagacggccggtcgccatttgagcgcatttcatcttcgagtttcggcaggtgaacgcgacatgcctctggaaaatgcttttcaaggcagcaaggttttcgagcacggcggcccttatacggacctttttgacgtcgatccgagggacgcaaagagagatccacgtcttcgaagctctggggcgctgaaagccttcaaatttcagggtttcgagtttccgttgattccgaccacggtgttttatgactggctatatctcaacgcgatctttccgcatcgacattggctgaagaaccgtgtggatggggaaaagcgctatgatggtttctccgacatagaatttaatccaagtaagtcgatcaattgccaggcaaaatcttgcgcattgttcgtatcattgatgcgtgaggacagattcgaggagtatctagaaactccttcaacatttatagccgcgatgactacccacatgttggattcgccggggcttcaaccgcacgtcaagcagcctcgatttcaagttggttgagcgaagttacgttttaaccaattatcagacagtccatcgtctagccgatgttacggaggccgcccgtcggcgcatcaccgaacctggtgtgcgcctcgtcgttgtactatggtctggtttaatattcgccggtttatcttttgtttccaagatagctgggctgctgatagcttccgtttaagtttcgtctgcttgaggaagcgatattccttgtcatcgaacaggtatcccatccggtaggcatgctcgataagatcgtcgttcgcattagcagagatatccgcgtgaatccgtttcagaccttcaaagaggtttcccgtatcaattccgacgaagcggttgatgcagacattgccgacataggttgtggcgccattgagccggttgcgaatgtagcaatgttccagaatatcctgaccgcagggacattgatcaaactcttcactgatctcgacgccgactaagtcccattcaagccgagctgtctcgaatgccatggaattcgataggggcacgatgtgtgatttgagacgctcaaaattatggccttccatcaagatcaatccctgcgatatcgttcctgttgggcacgccatcggtcgcgcgtggtcatgtcttcattttcttcttcgtcctcctccgcgctttcatgccagagcatgatcaaggcaaacccatttttctgaaggcagacctgttcgctgagagacggggcgcgctgccctcggactacgtcgatccacagatcgggaagctggctttcgatttcgcttggaaccccgatctggagatttcttcggtaaaacgtcgagccttgaggaaccgacttgttgcggcttgaaacgacgaaaggaaagcgcgttcgattgtgatagatccgcccaactttctcatctttgacgacaatgaaggccaacgcctctgggtgatactcggcataggcccgcgccatggcttctttgctgacttcaaacttgtccgctaactcgaatacatgttcaaggctcggcgaaggatgcttcttgaaggcgtcgcgcagtttcggtggcggcatcaggataagggaagagaagcggttcgcttcgacttccattttcgcccgccggttgccttccttcgcggaaagtgcccggagatcttcccttgagcagaggaactgaccgtccttatccgggatgtggttggcaatcaggaagtgaccgagctcgtggccaatggtaaaacggcgacgcggctggttcagcccctttctgacgagaataattccgcggctccgtaccgtgtcggtgatcaagccgccctcaaaaccttctgtttgcaactcggcaatttcttcaatctcgagttggagcgccaatttctcaatcggcacgggaagcggaagattgggttcatgcttcaggatcaggctgacgagcccctcaggcgaccccgtgtcggcaagatccatccgcaagatgtccatttactttccctttggtttgagcctgtccatcagcatctggattgtttcacggtcttgcggagcgagagatttaagatccctatacatcgcgactagaccaggctcctcgtctttcccgtctggattctcgccaactaagtcggcaatagcaacgcgaaaatgcgtggcgagtttggtcagaagttcaattgaggggttggtgcttcgaccggtctccagatcatagatatgcgtcttggacgctccaatggcatccgcgacgtcctgcaaggattgacggttcttgcccctgagttctttgagcttggcagccaaagacatgttcgaattactcccttgaatcactgaaggcgcgtgcactcgcatgccgcgccgttcggttaatctgtacaaaaatatagcacagagcttgacgatagcaagcgttcgatttatctgtatgaaaatagacgagcaaatcttacggctagatcccttttcgggcgcaggaggaatgcatgtttcacgatcatcgacttgtcatgcgggacggaatgcttatcggcgctcttgagcggatgtgcgtcactctcgaaatcgcgccgagccaggtggagcttgcgaaggagcgctacgaaggggtcggcggatggttggcggacgcggaggatcccttgcttaaggcaatgggaattttcctgcagggatcgaccgctatcggaacgaccgttaagccgatcggcagcaatgaacatgacgtcgatctggtagcccacgcgccatatctcggaaactgggtcgagccggctgcactgaagaaggcgatcggcgaccggttaaaagcgaatggccattacaagccgcttctggtggagatggcgcgctgctggcggcttgtctacgctaacgaattccatatggatattaccccgtcgattccaaaccgaaactgctatatgggcggtgaacttgtccccgatcgcgctcttaagatctggaagccgtcaaatccgaagggctacaaggcattgttccttgagcgtgtgaagcttgcgccgcgtttccgggtgacgaaaagcttgcatactcaggatcgcgcacgtgccgacatcgaaccttttcctgagcaggttcatttcaagggcctgttgcaaagggtcgtccagatactcaagcgccaccgggatgtcttcatcgccgtcaacgagatcgatatatccctgtcgccgatttcagtcctggtgacgacgttggcatcccagagctatgagtactgcgtcaggaccttcacctacgagtctgaactggatctgctcttcgacgtcatccggcacatgaccgacttcatcgagacgcgccgcgttgacggtcagatgcaatggtttgtctggaacgagacgacgaagggcgagaatttttccgaaaagtggaacggtgatcccaagcgcgccgagatatttttcacctggcacaccagggctctggcagacatcagcaggctgaaggatgtggaagggcttgatggcctgaggcgacaacttggcgacgccttcgggtccgccccggccaaggctgtcatagattctattacggatgacatctccacctctcgtcagaagggcactcttggcgtcgcaccccgcatcggccttgtgacaggtatgaccacggccaccgtcacccccgttcccgccaacacgttttttggaagatagccgccatgcggttttccgatccgaagccactgacagccgcgcagcagtttcttctactgacgaagaacccgttgtcggccggggatggtgaactcggatcaggacatttcagctggcactataaatcgtcacccacggcgctttcccgcatctatgatgctcggttagaatttgcggtcaatcgctcgccgagagtgtttctcgacaatcctgatctgctgatgctctccggtggaaatgaccttccgcatgtatacgaccagaagcctacccgcctctgtctctatttgccacgcacatatgagtggcagccctggatgaggctcgatcagaccatcattccgtggacgtcgctctggctcttctatttcgaagactggctgatcgacggcgagtggcgaggcgggggagagcatccggagcatcgcgatgtggagcagcgtgtcagtcgaagccgcttgcagcgacacgcaccagttcgaagggtcggttgaatggcaaagtcaaaggttcccgagaagatccagcgcgcgctctgggcgcgtgcggcaggtcgttgccagtttcgcggttgtaactgcgagctcatcggagaccttctcactggcaaagaggacaagatgtttggctttgtcgcgcacatcgttgccgactcgcccgagggggctcgcggtcatccgacaagatcagcacttctcgccaaagacatcaccaacctcatgcttctctgcgccaagtgccatcgactgatcgacactgaagcgccggacgaccatcctgaggaacttctggtccttatgaaggaagagcacgagcggaggatccgtctggccagtggtatccaaccggatcgcgcttcgcatgtcattcgtttcggagccaacatcggcagaaatgacgcgcttgtggcaagagaggatatattcgcgtccatgctgccggagcgctcgccggcgtcatttgaaacgattgatcttgaaatgctcggcctctcgctcgacgatgccgacgaacagtattggcaggttcagcaaaccaaccttcaacggctgtttgcacacaaaatcaggggccggatcgaacgacagcagatcgcgcatgcaagcgttttcgcgcttgcgcctcagcctctcctgattgaattggggaggctactttgcgatattctacctgccgaggttcatcaacgccacagagagccggcgacatggaagtggcagaacgacagcgctccgatcgatttcctagttgagacgccgactgagattcattcaaaggtggctctgattttagggttgagcgcgacggtgtcgagggaccgcatagtttcggttctgggcgacgatgtttcggtttggtcgatcactgtgagctctccacacaatgacatcatgcggaactctggggacctctcactttttcgccaggaactgaggcggcttttcaaccgtataaaatccgcgcacggagagggagcgacaatcaatgtgttcccggccttgccagtgtccgcggcggtagaagtggggcgtgtctggatgccgaaggctgatttgccgatgaatgtgtttgatcaaaatcgccgggcgggcgggtttgtctctgctctgcgcatccagtgaaaaagcgggtcgcaaagttcgaactggttcaagacctgaactgttagtgaggaaatccttgaacctgcaatcaagaggaatccgtaattcgtcgtcatttctgctttcgctgcgggttaccgatagcctcgcgttttcggttacgtttccgcccattgccggtgattgcggacatgcctcgcgtttcatcagccagacgaaacgcacccacaggctcgacgcgcgagccagtgaagtactaagctgacaagatacgcagggttttaaaacctggcctactccatgatttccgcgacgcgctttgcggtaaggcaccccagacaaggcgcatgttgaggtgccggtcatgcccctgtgacaagtgtccatgccattcccgctagagcgcagacgagcagtgtcgcgatgaccgatgctttgaagcggaagatcgcaacggccgcagcgatcgacagtacaagagccggaaagacgagagacccgattaccggaatgtcgagagagaccggtccgatgtgccaggcagtcgtcaggacaaacagggtgtggagcgcgaaccagacggccagattcaggatgacgccgacgacggcggcggtgattgccgacaacgcacctgtcaaagcgacgttgccgcgcagtttttcgatgaacggagcgccgaggaatatccagaggaaacacgggatgaacgtcacccacgtggtcaggatcgccgccagcgttgccgctgccatcggattgagcgaccctggatcacggtatgcgcccatgaagccgacgaactcgacaaccatgatcagcggccccggtgtggtttcggccatgccaagtccgtcgagcatctcgccgggtttcagccacccgaaattctgcaccgcctcctgcgccacgtaggccagaaccgcataggctccgccaaacgtcaccaccgccatcttgctgaaaaagacgccgatctgggtgaa

SEQ ID NO: 60 - DNA, 6293 bp, Rhizobium matallidurans
  source 1..6293: mol_type = genomic DNA
acgatctcaagatcgtcttcgtcatcgagttcatcggacggaaggacgccgaattcgtcgccggatttgaacagtgtcactggaaccatgaggatgcgggaaagcgaaaatgcgtggctttgggcgagtgcaagatcctgtgccatgtgagaaacctccgtccggagcaggccgatcccgctcgatggctcctcaaaggaccggggacggtcgcgatcaccgcgaagccaaaggcgcaagcggcggcagcttgctagccgaccccgatagtgggttgatcgacggagatccggacttgggtaccaggacgccatccataaagagcgggactggtttgcttcggcgggaattgaggtatccggcggagatggttcacagaagccagctcagcatttgttgccgagcatctgtttgaccagcccacgagtcagcgacggccggctttctcttgatcggacaaggctttgagaacagcgaagtccatctcagcgcatggctctatccgggctatctcgctggcgactttcgatcagtgccagaactcgtcgatatcaccactggaccgggtatggaacgcacggcgctgtgcttcgtagtaggatccggctgggtccgatattgcgagaagcctggcatcagcctgccatcgccgccgtattgcccggcgatgtgcgagccatcgtgtgaggaagcggatcatcaatctctcgagaccggtggcgacaggggcaagttgccacaaaatccgaatgatagggagatggtattatcttttgcatttcaatagcttagtgaaaattgcataagcatatttatggaacttattgcgtaggcgccagtgggcggctgggttttcatatagaaatgtaacgatcaagatcggaccccgcttcgcgataatactggtgaaactgggccactttggcatcgcccgcggtcctttcagcccaagtgtccagaacagggtgttgtttccgcgcgaattccagaagatcgagcgccttgttgaaacgcaggaaggaaacgaacccaatgacgacacgtcccgcaagcggcgcttgtgttgccttgactatacgcgccgaaaacaaggggtcatgtttgaacaagaactcgacccagcgctgaagggccggcgcctgctccaccaaagcaatccgctcctcgtcaaaatcgacccgatcgactattgtctggtcacggtacacaaccggcgcgtccgcgttcgtcaggcactgccagccggcgcgcgggacgagcatatccctttgatgatcttcgtccttataggcgtaaaacggcatggctctgcagcgcaccggcttgtcgatgtgtatcgaacagaggttatcttctgcaagttccgggcatgacatagatggcggaatgaaagacacaggggtgacaagaagcagcgccgttttcctggatgggagaacgacggaggctgcgatactgcctaccgaacggtaaccacgcgcaccgggtttgatcggcgtaatagtcatagccaggggaaatttgtgagcgtggctcaaagcttcatcgaccgtcagcggaagcaggccgtagcagcaggcaccacaggccgtgcaggaaaaccgctgctccgtcatgctcgcgccccgcagcacttcttatactttttccccgaaccgcaacgacacggctcgttgcgaccgatgttttccacccgcagcggcggagcctttggattgatctcgctatcatcgtaaagccaggcaccgtctacgcggcgaaaacttgcaatttccacctgtgagaagtcgcggttcttgcttcgataatggaacgcgaagtttaccgtgccactgtcgtcgctctcccgtccaccggtcgtgtcgcgcacctctagcagggtgttgaagaagtctctcggattgccttgagaatggcttcatcaccattgtgaaaggcaaatgtgatctcggtggagccgtcgtcgagcaattcggcgtgaccgtcaccggcggcttcatccatttcgtcgaagcctgcccatgtgaagcataccatcgacgggctgtagccgagatcgagactggcttgcaggacaccgaaggcaatttcgccacgattgccggtcccgatggtcatcacagcgggtgcgaccagatcgagatagtcccgatcccacaggtccgcctcgacgatccgccagcgaccgatcaagtggcagcgctcggatggcgtcatgacaacaccgccaggagcttcggcaaccgcaccagattgtaggccgccgccgagagcgtgaaggcccatccgacccggtcgcggccacggaacttcgtcttgtcctgccccgcaatggttttgatccagccgaaggcttcctcgatccgcttgcggatgcgctggctgacggcataaccgggatgccgcgtcgtacgcccgtcgatggccgagcgacggccatggttgttctgcgtcacatgcggtgtcaccctcatcgagcgcagttcattgacgaagtcctgggtatcgtaggccttgtctgcacccagcgtgatcgcctgcggacggtcggcgcgaggctcgatcatatgcaatgccgccacccgttcggcatgaccgctggcctcggtcaggcaggcatcgaccagcaggccatgacggttctccatcagaccatgccccatgaagcacagcttcgcctccttgcctttgccttttttatagagcctggcgtcgggatcggtcgtcgaggcatgcgtctcattggaccgtcggtcgccatggaagtctgcctcggcattgcgtccgccgcccgacgccggcggttctccagaactgtccttcggcccatccttcggcgtgacgctcttcatcgaggcccaggcttcgatcagcgtgccatcgacagagaagtggtctgtggaaagcagccgcctgaccttggactgcgaaaggatcgcgcccaggaacttcgccgcgatatcgccctcaagcaaccggtctcggttcttcgagaacaccgagtgatcccaagttgcgtcgtcgacgccgatgccgacgaaccagcggaacaacaggtcgtattctaaccgctccatcaaaagccgctctgaacggatcgaatagaacgcctgcagcagcattgcccgcagcagcctctcgggcgcaatcgacggccggcccatcggcgaatagagcatcgcaaactcttcgccaagcacgcaaagcgcctcgttgacgatcaatcggatcgcccgaagcggatgattgcgccggacccgatcttcgagatcgacataactgaaaagctcgcccgtccttgtgtcgccgccacgcatccatcatccccaaaacctcacagaaacaatgaatcacgcaaaataattttaagccagaacctttttcaacagcctgctaggccaagccattctgtaccgggcaaggaccgttccatatcaacgcgattaaacgattgcgatgcatgttcggtgatggtgctctcgatgtaatcgagattgccgagcgtaaatgccgtgtagcgcgcgcgcatcagggcttcagcggtcggcgcaggttgctggccagcaatgtgtcgactgcaacaggtcgcaaattcctttgcggaaccgcaggggcatagctgcagtgatggattctgaatagtgtactgcgacattgtttttgctctctaaaagattggactggccgaaagtaatctaccggcgtaagggcgcgatcttagccagatcgttgcgaatggatgtcgctgcaacgctggcctgtcccatcgcatggcaaatctgatcgagacccagcaacaaatcccccgcagcatatacgccgttcaccgatgtcctctgatgtcggtcaacaatagggcatccttcgtctgaaatatctgccccaatactgaccgcaagatccgaccggatcgttgtaccaagtgcaggatagagactggcaaatgcacgggcgccctcgggtaaagaaacttcaattaaatccggctttaggctatatccgaaacagggcccatcaaggagttcgatacctgcagattttgctctggcgcactgactatggtcaagctgatgtggcgcatcgggggaaataagggacaggtttgaggtgaaacttcgtaagaattcggcctctctaagtccatactcgcccgttccaatcacaccaatccgacgatcggtgacctcatacccatcacaaaccgggcaatagcgcaacaaaccgcgcgctaaggcttcatcatgaatagcttcagccatctttgggcgcgtgttgacgacaccggtggcgagcagaaccgtttttgcacgccattgatggaacgccgtctttgccaccagaagcgatccaacttccggcttcagggacaagacttctccggcatcaaaacgagcgccatacaaggatgcctgatcccgcatgcgcgccaaaagttcgcttccagcaatgccgccggaaaatccagggtgattatgagtcactgggatcatggctgcccgacttctgccaccgtcaacaagaagaactgaaagatgaaaccgcgcaagatagattgctgcagtcaggccggctggaccgccaccgatgatgagacaatcgtaatcttcgatgttctgagtcgtattcacagaagcctccaatttgagcggaccaaattcgatcacgcgtatagcaatactgctcagagccagatacgggcgactagcgcgcagaaaacggatcagccaaagctgccgcagggcgacttatagggtagttgatgtccgatacacgctgggcaagcttagcctcgccattctgcttcaggagggccctgaaactcaggatgcatcccgccgtcttgatacgcaagcggctctaacgcctttttagatagcaaattgaaggcactctcgtcctttcgcattttggcagccaccaatgcgtcgggctggtcgcttctcattggacacgtcgccaacggatcaacaggttgttggctgttgaaatccgcgtcgaagacatagcgtttctcgcacatggcgacccttggctcacgcttcctgacatcgaaaatgtcatacccctgcttgaggtttttccagaacatcaagttttcgtcatctcggtgtgctgcaaggttttccggtgtcatatggaaaggaaacgcctgaacctggatggctttttgtcccgctttcaatgctctttctatgacggcgtaaatttcaccaacaccttgatcggtcaatgcaaagcaacctgaagatgagcatgccccatgcaccatcagtgcctctccggagtagcccagcgcggcttcgagccggttgggatatccgagattgaatgaaagatagaactgcgatttggggttcaggctgccctgagtaacccggtaaaaaccctccggagcctgccggtcgccggttttggttttggggcccaactttccagaccaccgacacatgggaaaaactttaagaagcgcgtactttccgctgctgtcgattttccagacctcaagttcactttccattttgaagatgcgaatcagaacagggctgtccggctccattcctttcgtccgcatatcggcgagaacgtaggcgggaatttcccgggaaagctgacccagatcgtccagcgacatctgaacgcaaccgctgaggaacgctgaaagcgtgagaccggccaaagtagttagccatccgacggttccaaaagccctatttttatagtttgtaaatcgcatcggctgctgccacaatgcactgatagacccacacaaggtcatgacgtctctcttcaaaaacctaaaaaaccaagtggaaatttaagttagaagaatgggaggacgctgagtaacagacactttttgccccgggaacacgcgcgcggatgcagtaatgaaaacggtattcacgccgtcatcgggcggttgagcagaaaaaactacaaacaaaccgtctggcgggcagtgattgacagaccgactttcgccaccgtttgcatgatgtcccactgccttcactgagctttgcgaggcggttgaggcggtcggtcccgacttctgccattcaagtccaacatcatagccgttgcacggcacatagagcgcggcaaacaacataagagcgatgatggctttgatcagtccgcgcatcggatccgtcatatggatattggttcatttatgacgaccatgagcaaaaacgctacgcgcgtcaatgctacaggaactgttggcagtattcgcttgggatagcaaaattctcaaagcccattttcgggatgctccaagtaaacgcgtt

SEQ ID NO: 61 - DNA, 5300 bp, Rhizobium matallidurans
  source 1..5300: mol_type = genomic DNA
gacgcattatgccgtaagccggattatgccgcatagccgatcttctgcgttgaaactcctccattcggccatgcgacggttcggcataatcgaggtgctgacgtgcaacgaggcctacggcgtcgactcataaactttggcaccatattcttgtggcgacgagctttatcgcagcgaggtagttttccgggcgcttgtcgtatcgggttgcgatgcctcggaactgcttgatcctgttgaagaaccgttccacgagattgcgttggcgataaacccagcgcgagaacacgaaggaccccatgcgattactctttggcgggatgttggcccaggcctttcgttcggcggccttggccctgatggcattcgtgtcataccccttgtcggccagcaggatatcccccgcgccaagctcatccgtcagcgcgtcggcttcggcacagtcggcgatctgtccacccgtcagacgcagattgaccgggcgaccctcagcatcgacgagcgcgtggattttgctcgtaagcccgccgcgggaacgtcccatgccaccatcgtctccatccccttttttcccgtggccgcgtgctggtgaacgcggacacaggtcgagtcgatcatgacaatgtcgccgtcgtaggccttggacaccgcttcaagaagccgatcccataccccggctttgcgccagcggacgaagcggttgtaacaggtcgtcggcgggccatagcgctccggaacttccgcccaaggcgagcccgttcgaaaccgccagagtataccattcagcacccgccgatcatcaacgcgggcaacaccgcgtggcttgttgggcaacaacggcgatatgatcgaccattcgtggtcagtcagttcgtagcgacgacgcgtcatcaaatgcttccctatttcgaagccttgaatcacggcgcacgataaatgccaagaaattttatgagtttacgccgtagcagaacaaggacagagagcgctactccgggagagtcgatgaaggacgtaagctaggatagctcaacggctgggaaggacttgaccaagtcatcaatcgctttcatttgacctaaaaacgccgggagcttgtccaacggtaaggcgctgggtccgtcacaacgcgcggtctggatcgggatgggcctcaagaaatacgcccgccaatcccaaagctagcccggagcgggcaagttcaaagacttgcttccgtctgccgccagaactctttgcgcttggatcgcgcatctgcaatgaatgtgtgacgtcaaagatgatcggcgcgccttcggtgacttccttcatgacgctgaatccaagcatatccacgacgagattatcgtaaccgaagcaatttcctcgctcacatataatcgcttggtcgtttccaaaatcagtgagcttgtcgatgacgtttccgatttgacgcggactcatgaactgaggttttttgacattcacgacctttcccgtcttggcaagggcttcgattaggtccgtctgacgcgcgagaaacgctggaagttgcaggatgtcacaaacctcagcgaccacagccgcctgctctgggagatgaacgtcagtcagaatcggaacattaaagccgtcccgcacatcctgcagtattcgcatgccttcttcgatcccaggtccgcggtaagattgatttgacgagcggttagctttgtcgaaagaggccttgaagacatatggcattcgatagcgagctgtctcggctttcatcgtctcagcaactctcattgcgaggtcgcggctctccaaaacgttgaccccgccaataagcaccatcggtttggtgttcgaaaatgcaatatctgagccaagctttaccgtcttcacgtcaactccttgtcctgcgtcggacattgtgcacctgattactgctacggatatcggccattacagcaggcatttgcaaggtccgcttttagcactgtcgccagttgccgcgacggcaggcaagaggtcaagccgcgagcgactggccctaaaggatcctttggcgtgaagattacggctccaacaacaaggagcgctgaaatgacaacatccgaccatgccacctgccttgacgcttaccttgcgtcattcgagcggagtcttgctgccaagaactaccaacctgcgaccctgaaaaactatcgtcaccacctccgacgctttggcagacttctggaggccgaaggcatcgcgccatcggaactgacggcggatatttgcgtcgaattgggacggcgactgccaacatcacccaaatcccagatcaaggttcccaatcttgcaaagctgttcgtcgagcatctgatcgaaatgggcgtggcgacacgcccgccagttactgcagctcaggccgagcgccaagaactcctcggcagcttggagctttacctcctgcggcaacgcggcctcagtccacggtccgtcaagcacgtgctagggtttgcggctcgctttctggctcatcgctttgggacagaaagactagatcttcctgggcttaccgcccgcgatgtcgttgcgttcatggagcatgtcattgtgcgtaagacaccttaccgcgacaagacgttgtccacacatttgcgcggcttcttccagtatctgttcgcccgaggcctcactaccgccaacctctcactgtgcgtacccagcgtacgtaagccctggggtgcgagacttccgcgatatctgtcgcccgatgatgtggaggccgtgctggcatcggtcgcgaccaatccacggcgaggcgcccgcgactacgctatgttgcttttgatggcgaggctcggcatgcgcgcccccgaggttatggcagtccagctcgatgacatcgactggcgagccggcgagattctagttcgcggaaaaggacaacgccatgaccgactgcccatcccgccagacgtgggcgaggcgatcagcaggtatttgcgcgaggagcggacttcaacgacaacccggacgctgttcgtaagccatcgggcgcccaaccgtccgttcaaggatagccagatcatcaactcgatcttgcgggaagcgttcgcggcaaccggggtgaagccgccgacgccctatgtcggatcgcatgtccttcgccacagccttgcgacgaacctggtgcggtccggtgcttcgcttgaggagatcggcgatctgttgcgacaccgatcgcgcgcttcgacgatgatctatgcgaagctcgacactgatggattgcgctccatcgtccaaccttggccagtcgcggaggctgcccaatgagcttccttgccgaacagcaccgctacctcagcatcaaaagacggcttggcgccgatctgagtacggacgaacgcatattgcgtcgcttcaccgcctttgccgacaagagtagcgcggaatttgtcgataccaggttgatcatgcgttggcttgagagcctccccgctgccagtgccggcacccggggcgctcgcttccgggtggcacgtcaatttgccctctggctccacggtatggatccacggcacgaggttccgccccaagggttggtgcccgctcatgtccaacgggttcatccatacatctacagcgatgccgaaatccttgcgattgtcgagcaagcccgaacgttgccatcggtgtacggcatgcgcggtctcacaagttcgacgctcttcggcctgatcgcggtgaccggcctccgcatcaacgaagccctgcgtctcgaccagtctgaccttgatatcgagaccggcgttcttcgtgtccgcttcggaaaactcggcaaggaacgaatactgcccttggatcgaacggtagtgcagaagctcgaacgttatgggcgtgagcgagaccggctgctggggctcaggtcagaggccatgtttgtcacctgcgatggccatcgtctcggcgattgcggcgcacgctacaacttcgcgctggtttgtcagcaaattggtctacggccgaggcaggattacaagcgccatgggcgtgggccacgcatccacgaccttcgccacaccttcgcggttcggacaatgctgaactggtatcgttccggccaggatgtcgggcgtgagatgatcaaactcacgacctggctcggccacgaaagcccggccaatacctattggtatctggaggcggttccggagttgctggaattggcttccgcccggatagcaaccgcaacggagggggagcaatgaaggcgacgaacttccctgcgctcatccaacgcttcttcactgaccgtctctgcacacagatggaggcaagcccccacaccatcgccggctaccgggacacattccggctgctgatacgctacgctagctcacggcgtggaaagccgcccacaaagctgacgatcgaagatcttgacgccgatcttgtcgctgacttcctatcccacgtcgagacggcgcgcggtaacacggcacgaacccgcaatacgcgacttgccgctattcgctcattcttccgatacgtcgcgatgaccgatccgacctggcttctccactgccagcgcattctctcgatgccaagcaagcgatatgtgaagcgaagcgtgactttcctggacgcagaggaaatagtggcgctgttggccgcgccggatcgaacgacgtgggttggccggcgagatcacgccctgttgttgcttgcgctgcagaccggattgcgggcctccgagctgatcagtctgcgctgcaaagatgtggcacttggagcaggcgcccacatccgttgcgtcggcaaggggcgaaaggaacgcagtacgcctcttcgtcgcgatacggcaaagctgatccagggttggattggggagcgtcgtgatagcgacagtcccctgttcccgtcgatccggggcgagcggctcagccgtgatgcacttgaacatctggtgcgcaagcattgcctcacggcatcccgagtatgtccgagcctcaggagcaagcgggtaacgccgcataccttgcgacatagcacggctatggaactgcttcatcacggggtcgaccaatccgtgatcgcgctctggcttgggcatgagtccgtggaaacgacccagatctacatccacgccgacatgcgattgaaggagaaggccctgtctcagatcgtcagaccggaagccaatcccgggcggtatcgacccaacgacgaactgctcgtgttcctagagtcgctctgattatgccgaaccgtcgcatggccgaatggagcagtttccacgcagaagatcggctatgcggcataatccggcttacggcataatgggt

SEQ ID NO: 62 - DNA, 4606 bp, Rhizobium matallidurans
  source 1..4606: mol_type = genomic DNA
gaagaaagccttgtcctgctgccggcgcaggctgagcagctcggaggcttcatcgagttcgacgtcgccgcacaggatcggctgacccgccctgaccgctcttttgagcttgcggttggccgccagatagaaaggcaccggaacgtcgtcgccaagcttgcctgcgggtaccatccgcgcggagacgtcaacgatcgaatggtggtggccgcttgcggtcagcaccgtgccggcggcgatgtctgcatccgcgtgagcgacgagatcgatgacgggcttcggttccacggcaccgctcgaaacgcccctgagacccacttcgagaatgctggtcgccgcctcgacgcccagcagatggcgggggatgtagagcatggcgacgtcgcccttgcggctgacgacatggcctttctcggcaagcatcgcccaggtctcggcatcgtcgcagcggaccgtgacgaagacgccgccggcaaagctcacctcgccgggaagcctgaggcagtgaaagacgtccaggctcctcggtgtgtcgagcagcccgccgctggcgcgcggcgagaagaagtcggcgacctcggtgatcctggcgatcggcgcatgcagcgccggccggtcgacggtgaagccgttggcattggcgaccagcgtcatttcgcacagatcaggcacggcgcgctgcgcaaagctctcggcgatcgcgccgcgccgggcggcgatctcggtgagagcgacagtcgtcggctcgatcaactcgccgaagccgggaacggcggcggttttgccgttcgatgtcagggtctcgttttccgggtcgaacacgaagtcgtattcgctggccttgccggcggcgacgatgtcgagccccagcacttccgcccaggtgatcagccccatcagcaggctcggttggtcgccgtcgacgggcgtgacgatcacgttattctgacgcgcgcgcagcgacaggccggggccgacgacgctgtcgacctcctttgaaaccagcgccacatgcttgccggcgtcgatcgccagccggcaatgccgggcgccggcttccgggtgaccggtcgcctcgaccacgacggagaccggaagaccgagcacgatggcgatatccccggcggcgatgaagaagccgttttcccaggccgccttcgtttcttccgccgtgacgcagacggcgatccgggcggcgtcgatgccgaggccgcgcagaacatccgccgcggtctcggccttcaggtcgacggcgacgcgggtgctgatcagcggcgtcttcaggctctgggcgagaaagctgcggccgaagccgccggtaccgacgatgcagcattccacgggttcggcctgtgtgccgaaatggctatggtaattcatgggtttccctcgcatgcccgcgggcgtgtcggcagtgaaaaatggacccggcctcaggcggccgagtccaccttctcgcgtcgcttgatatgggagatcagtttggacagctgcggcacgacgaggaggccaagcgccaccaccatgatcccgccgacaagatagttggagaagaacacgccaagcgatccatccgaaacgatcatcgactggtagaacgactcctccgccttgtcgccgagcaccatggcgagcaccagcggcgccagcgggaattccagcttgttgaagatgaagccgacgaccccgaagatcagcacgacccacaggtcgaaggtcgagttcgcgaccgtgtatccgccgacgaagcagatggcgatgatcatcgggccgatgatggtgaatgggatgcgcagcagggcggcgaacatcggcacggtgaggagcacgagaatcacgccgacgatgttggccacatacatgctggcgatcaggccccagacgaaatcgggcttggtggtgaacagcatcgggccgggtgtcaggccccagatcatcaggccgcccatcatgacggccgccgtcgccgaactcggcacgccgagcgccagcatcggcagcatggcgcaggtgccggcggagtggtcggcggtctcgggcgcgatgatgccttccggacggccggtgccgaacttggcgccgggcttcgaccattgccgggcaaggccgtagctcatgaacgacgcggcggtcgggccgccgggcgtgatgcccatccagatgccgaccagagccgagcggatcaccgttgcatagtatcgcggcatttcgcagatcgtcttgaacacgtcgcgcgggtcgatgcgggacgagacgccgcgaaaacgcaggccgtcctgcacggtcgcaagcaattcgccgatgccgaacaggccgatgacgacgacgaggaagctgatgccgctgatcagttcgtcgaagccgaaggtcaggcggagcgacccggtcacggtatccatgcccacggtcgaaagcagaaggccaagcccgagcgacacgaccgttttcagcggcgcggcgctgcccatgccgatgaaggcgcaaaaggcgaggaaatagacggcgaaatattccggtgcgccgaatctcagggcaaaattggcggcccaggacgacagaagcgtaatgacgatgacgccgatcagagcgcccatgccggcggacacgaaggcgaaggtgagcgcccgggtcgattgcccggtccgggcgagcggatagccgtcgaatgtcgttgccaccgaactcggctcccccggtatattgaacaggatggaggtcgtggagccgccgaacagcgctccccagtacatcgatgccagcaggatgatggccgaaaccggatccatcgagaatgtcagcgggatcaggagcgagacgccgttcggcgcgccgagacccggcagaacgccgacgatgaggccaagcaggacgccgaccaccatcagcaggatatgggtgggggtcagcgcgatgccgaagccttgcatgagcagttcgaaattggccattggaatgcgccgccttccttaatagatgccgagcatgtcttcgagcggtcccttgtgcagcggcacctggaaggcggtctcgaaaaccagatagagaacgatcgagaagacgacaccgacaagcagcgccatgtgcggcttgtacttgccctgccgccaggcgacgtagaacaggtagagtgtggtcgcgacgtagaagccgaggaagatggtcacgacgacataggccgccatcggcaggaagaaggagaggagccgcagcgtttgctcggactccaggaatgtctcctgctgttccgagctcttcgccttgatgagtgcctggatggcgcagccgatgccggccgcggccacgatcaggccgacatagaagggaaaatagccgggcttcgggcctgaatcaccccaggcgacgccgagctccagggcgccgctcgcgccgagtacgccgacgatcgccaggcagctggcggtgatgatctccatatggaggcgcttgatatgcatgatcgctttccttcgtcgaagggtccggcagaagctgccggacccgttggcgcttgatgcttcgcgacgcgattactgaaccagccagccttcttccttgaacaccttcacggcgttcgtttcgctgctggaaatgaactcctgcagcttgtccgggccgagatagtcgccggtctgcgatgtcttcttgatgtagtcggcccattccggggtttcgctgaccttcttcatcacctcggcatagtaggcgatggcatcgggtggcgtgccggcggcggcccagaccgtgcgcggcatcttgtagttatcgatcggaacgccttgcgaaacgcaggtcggaatgtcgccccagcccttgccgtcatagaccggctcgcccttggccatcggcgtcggcgagaagacgcagagcggcttgacggcgccggcctgccactggccgaggttttcgttcgggttgttgacgttggccgcgacatggccgccggccagctgaacgccgacctcgccgccgccgttgaacggcaggtacttgaacttggcgcccgtcgtctgcttgatcagggcgaccagggtttcgtcggtgtccttggactggctgccggcgaacgccaccttgccgggttccgccttgccggcatctatcagctctttcggcgtcttgtaagcggaatcagccttcacccagatcaggaattcgtcgaaggcgagcgcggaaaccggctgcagatccttcatcgaataggccatcttggcgacgcggggcaggagataggcgttgttggtgccgaaataaagcttgttggcgtcgccctcgttcttcttggcgtagagaaacgcctccgcgccgctgccgccgcccttgttgagaatgaccatcggcttgctcatcagattgcgcttggtgatgatcgactgaatggtgcgggcgaagttgtcggtgccgccgccggggccggacgccaccacgaattccaccgggcgcgtcggctcgaaggccattgcctggccggcaaccgccagcgtcgcggcaagaaccatacctgcagatagtttcttcatcctgttcctcctttgagatgaaagccggcgcaacctccgcacgccggtatgcacgtgaaaacttgctaggcggcgggccttgcccttcc

SEQ ID NO: 63 - DNA, 4360 bp, Rhizobium matallidurans
  source 1..4360: mol_type = genomic DNA
tcgcaaaagcgccaggcagccaaggccgcctgataggacggcacgagagagccacatgatttcgcagccggcggggtaaccgccggctgcatgaggcccgcgagaggatgcgggctttccgatggaacaatgggaggattgcaatgaccggcgcaacccgcaaatggacgcgcgacaactggccgatcgccgcggcaatgatccagtacccgaacatgctggccgatggccgctcggttcaggatcagggcgccgaggagtggtcgcggaccgtcggcgaggtcgccgatgccggctttaccgagatcgacccgaccgacagctggctgcgcgtcgccgatctctcgcccgggcggcgcgccgaatttctcgacgtcgtcgcctcgcacggcatgaccatcccggccatttccacctcccggcgcagcgttatcgacgctggcaacggtgacgaatacctggcctacagccaccgcgtcatcgacaccgccgccgaaatcggcgccgccagcgtgtccttcggcttcttcgagccgctcacggagacgcagaagaaagccctctggttctggaccgaacagggcgcgaaaaaccccgacgatcccgccgtctggaaaaaagccgtcgcccgcatttcggagcttggccgccacgccgccgaactcgggatcgaggtttcgctcgaaatgtacgaggacacctatcttggaacggcggacagctccgtgcgcttcgtcgaggaggtcgggctcggcaatgtcggcatcaatgccgatctcggcaatctcatccgtctccaccgtccggtcgaacattggctgcagatgatgaccaaggttgcgccctacgcgaaatactggcacgtcaagaactacatgcgcatcgaggacgagcatgccggcctgatcgccacccatccggtgccgctcgaatccgggctgatcaactaccggacggcgatcagactggcgctcgagcacggtttcgccagcgccttcctctgtgagcattacggcggcgacggtctctccgtcagcgccaccaaccgcgattatctccggcgtatcctgccgcgtaactgaggaccgtttcatgacgacgatctttgatgctcccgaagagtttgccgcaaccgcgctcgccggcttctgccggatctacccgaaccatgtgcgcctggtcaccaatggcgtcgtacgcgccaccaccgtgccgaagggcaaggtctccgtcgtcgtcggcggcggctcgggccactatcccgctttcgccggctatgtcggccccggcctggccgatgccgcggttgccggcgacgtcttcgcctcgccgtcgaccgcggcggtcgcgcgcgtctgccgccacgcccatcatggcggcggcatcattctcggcttcggcaactacgcgggcgatgtcctgaacttcggcgtcgcggccgagcggctgcgtgccgagggcatcgatgtgcgcatcgtcgcggtcaccgacgacgtcgccagcgcgccggccgcctcgcatgccatgcgccgcggcattgccggcgacctggtggtcttcaagatcgccggtgccgccgccgaggcggggctctcgctcgacgaggtggagcgcgtcgcgcggcttgccaacgaccgcaccgtctccttcggtgtcgccttcgccggctgcacgctgccgggtgccagggagccgctgtttaccgtgcccaagggccgcatggcgctcggcctcggcatccatggcgagccgggcatcagcgaacaggacatcgccagcgccagtgatctcgccgccctcctggccgacaagctgctcgccgagaagcccgccgactgcacccgcgtcgccgccgtgctgaacggccttggctcgaccaagtatgaagaactcttcgtcctgtggacggcggtcgagaagaagctgaaggccgtcggcctggatctggttcagccggaagccggcgaatatgtcaccagcctcgacatgcagggctgctcgctgacgctgacctggctgacggatgagctggagcgctactggacggcaccctgcgacgcgccggccttccgcaagggccgcaccgtcgccgccgatctccgcaccgacacgatcacggatgaggaagcagcgcccaacattccggctgccaccgaaatctcccgccgcaccgccatctgcatccgcgacctcttcgccgagatcgccgcgctgctgaagaaccaggaagccgaactcggccgtatcgacgccgtcgcaggcgatggcgaccacgggcagggcatgcggcgtggcgccgaagccgcggcgaaggcgatggcggcggccgtggacgccggtgccggcgcgcagaccacgctggcgctcggcggcgacgcctgggccgaccgcgccggcggcacctcaggcgccatctggggcctgctgctgcgctcctggagcaacgccttcagcgatagcgaagcgcccgacgacaaggccgtcaccgaaggcgcgcaactggcgctcgacggcgtcacccgcctcggtcgggcccgcgtcggcgacaagacgctggtcgatgcgctggtgcccttcgtcgaaacactgaaggcggaagccgggaagggaaagccgcttctggacgcctggacatcggccgccaacgcggcggatgccgccgccaaggcgacctcgtcgctgaccccacgcctcggccgcgcccgcccgctcgccgaaaagagcatcggccaccccgacgccggcgccgtctcgctcgccatggtggcgcagctggtggccggctttatcggcagggggcggtaagctgaacggagcgcctatgtccggagcgacgcgcgcggtccggacgttctggcatatgtgccgactgaaaattggcgttgccgccttatgttgcgcggatcgtcaaaatgcctttggccattgctgatgcgcgtgcatgatggtgatgatttctatgtcgcgcgaaacgcgataggcaatgatgtaaggggcatcggccaagacgacttcacgagtgccgttgatgcgtcccggccggcctaatgctggtaggccttcaagcatatcaacggcggaaacgatgcgggcaacgacgcgcgccgccgcgtccgggtcgtccttttcgatatatccgccgatttcatcgagccggcgcaacgctcttaccgtccagcgaatacgcttgccgctcatgatcggtcagcggatttgacgtatttgctgataacctttgccacatcctggtctgtcgcgaactcaccgcggttggcctccgcgagcccggcctcgatctcggccaactgccattcctcgcgggcaacataatcctcaatggcctgagctgccatgtaagcgcgggagcgatcgcgcttttccgcgatcttttcaagtttgctggcggtttcttcggaaacccttacggtaaaggcagccatcgcatctcactcctgctggttcaaggtgattgtgggttgaaccacgttggttcgtcaaggttcttcgctgtgtggggagccgagacgatcggccagctgccctacccgaacaagcccacacccgtcagccacaggccggatgccagcgtgatggcgtccatcatgatgcggaaggtcttttccgacatgctgacgacgtagcgctttgcgaagaacgtgccggccatcagcgaggaaccgatgatgaggccgcagcacgccggtttcgcggaaggtgaggatcttggcggcttggacgaagatcgatgacgccgcttccgtggaaaggaaggcgcctcgggtgaggccgaaggcgaggaaggccgggatgctgagcgggccggtcgacaggaatagcccggtcaggaagccgacgatcgcgccagcgaccgcgagccccgccagcccgatcgtcaggttctgtttcttgagaaagcgccgcagcggcaccagcgtcaagatgaagaggccaagcagcgtgccactgatttcggccggcaggttgacgaggctgatggcgccgagcgaggcggccggaatgcccgggatcgcataggcaagcaccgccttccagtcgacctctcggtgccaagccatgacgcgcgccgcgttcgccatcagcccggcgattgccatgaccggaatggcgcggctcggatcgaacatcggcaccaggaccggcagaagaagcaggctggcgcccgttccgacaatgccgctgaggccgccggcgagaaagccgatggcgcagacgatgagataggaaatcaccaggctgccctcgagcatgtcaaaagtgcgcagcggttttgctgcaccgacatgcgatgaaacaaagacttaaaacgtgacgcgcgaatccgaaggatcgcgacacgcct

SEQ ID NO: 64 - DNA, 3495 bp, Rhizobium matallidurans
  source 1..3495: mol_type = genomic DNA
aatcgagggcgactggccgtacttgtgggtggacggcacctacctcaaagtgcgggcgcgtcaggcgggtgggcgacgtcaggacgcaagccgtgaaggcgacggggccaagcggatcgctgtttgcgcggtccgaatgggaagcgctgatcgagagcaacgaacccgttctcgatcacacgagccggctgcctggggaattcggtggcgagctgaagcttgaatcctttttcgacttgatgatcgcgaggcggctgtggaatatcgtggagaatggctaacggatagaggtggcccttgatgaggtttacgccatttccgctgaccgccgttctccgataagggaggtcgagatcgaactgaaagagggacgcgcgagcgatctgttcgttttcgcccctaaggttgatacggtcgccagcttccggatcggcgtgagatcaaaggccgagcggggcccgaacgccgccgccgcgttcaaggcgatcgcgctctgatgcgttcgccagtataggctcagcggggatactttcctccagcgccaaaaccccgcagcccttcaccaggcgagggtagtgctgcgccgcctgcgatccgcgatcgtggttaaagagcgtcctgccgggtagcggtcacgcgggcgagctgcagtcatatccccgcgcggaaaaaagcggacccagcggtcccagtttttgtggttctgaaacataccgtgtacgaaaaaatctgggttatctctcatccaccatttggtttcgagacatcgaacccggcgcagtcaaacctgttccccgcgtcgcccttgccttcaagcccgacggcgcttggcggaagaggtcatctcatcgaccaatgacgcgatggccgtcacgctgtagggcttgggtataaacaccgcgcctgtcggcagatcatcttgactaagtagatgcccaccggaggcgacgatgacggggacgctcgcgtggtttcttgacatcatccgcagaagatcgaggccgctcaagccacccggcatatcaacatcggtgattacggcatcaagctctttttgcccgaggattgcgacagcctcgagaacgtttcctgcttccagcacatcgtagccccggtcaaacaatgtgtcggcgagcaccattcggatcaaaagctcgtcttctacgataagtacggtacgctggtacatggccgtctccattccgtggatacgagatgaactcgctcgcccaggttttcgatcgcccctccgacgggattattatcgaacatatttaataaaatacgaacgaaccgccggaaggtggcgtcctaaaacctccaagtatcgcggccttgaagatgacggtggccgcaatcccatgatacagatgacctctgtggcttttacttcccgatttcaaacggcaaaatgtcataggcaagttagttttagcgaatagattcgcgcgaattttccgctaacgatttcaatgaagcactctcttgaccaagcaattgcgcgatccaatagtcgcaactcgaccgattccggatgagcaatggtcggccgctcgccgcttgtctcgagagctggacaaaatcctcgataggatcgtgtcccatgagatggtgtaactgccgacgaggccaccgtactctccggcgaggccgggaggatcaacgcgccacggctggcaagctgatgattggatcatcgctcattttgccgatggtttctactgtcatgtaacgcgaccgttgcaccgcccacttgatggcatggaccgctcccttttcctcagcgaatatggcgctgtctttttagcacagaggagccatcccatgcctgttgtcaccattggtcttgatctcgcaaagacagtgtttcaagctcacggcgtcgatgctgccggccagactgttcttcgtcgtcgccttggacgcggtgaactgttggcgttttttgccaagctgccgccgtgtctgattgcaatggaagcatgctcaagcgctcatcactgggctcgggagctcgtcattctaggacatgacgttcggctcattccgccgcaatatgttaaaccctacgttaaacggaacaagactgacgcggcggacgctgaggcgatatgtgaggctgcgggtcgacctaacatgcgctttgtgccgatcaagactcgagatcagcaggcagtactcgttctgcatcggtctcgttccttgctggttcgccaacgaacggcatcgatcaacgctgtgaggggattggttggtgagtttgggcttatcgcatcgaaaggccgctaccgcatgtcagaattgcggcagcgcatgaatgcaatgacgcaagaccaactgccatcgatcgcctgccaagctatcaataccctgtttgatcatatcgatgtacttgaagaacaaatcgctgctgtcgagcgacagattgtcgagtggcataaaagtaacgaagatagccttcgactggcgaccgccccgggcattggccctatcacggcgagcgcgatcgttgcagcggtaggaaatggtcgtcagttccagtcggcgcggcattttgcggcctggcttggattgacaccaaggatgcatgcaagcgggaagaaagagcggatcggaaggatcagtaaaggaggggaccgatatctgcgggcgcttctaatccacggcgcaagagcgattgtcggtacgttgttccgcaaaaacgtaacgcctcgtccttggctgcttgcactcgcggcacgcagaccgaccaacgtcacagctgtcgccgtcgcccacaaaacagcgcgcgcgttgtgggcaatgctgacacgtgaggaaaaataccgcaaaccaattgccgcggcaccgtctgcagcataacagctccagcactgttcccacgaccagtgctggcttgcgagggtaagcgaatgtgatggcaaaccggtatgatccgggttcggcaaaggcccatgaaatgatgcgagccatatgagctcgtccatttgtctggccgccgatccgcgaataccatcaaggccagcggccgagcggctcgcacagataggccggatacacgaccgcaagcaccgtgtctgccgtgacgttcaaattatccttgcaaaccgggagcggtccatacacatcgttctgctcgaggagcattgcaccgacgagcctgacaatggcgtcttcgttcgggaagatgccgacgacatccgtccgcttcttgatttctccattgagacgttcgattggattcgtggagtgaagcttggtccaatgttgcttcggaaaactcatataggccaggacatcgtgctcggcctcatccatgatcgcagcgagcttgggcactttagggcggatctgatcggcgacattgcgccattggctgcttgcggcctccggggtctcctgagcgaaagctgttccgatgaaggcggaaacgacccgcctgccactcttgcctgcatgcgccagcacattgcgggcgaagtggacccggcatcg

SEQ ID NO: 65 - DNA, 2934 bp, Rhizobium matallidurans
  source 1..2934: mol_type = genomic DNA
ctcccactgtccgcgacacaacagtcccatctagattgtcgcgcgagttccttccagattgccgcgctatagcgccgagacagtcgaaaaaggcgatgacatcgaacgcaccatacccttcatcaaggcctacaccgtctttaacagtgcgccgtaacggcgaaagtatagggagtgtcacgatgagtgaatgagcttgctggaatagctcatgcctgccgaactaacctcgatcggcaacgattgtgactccgaaaggagcggggaacaatagcatgttcggaaaaggcccaaagcatcaaagtcgtttgcgatgcggcgggtcagggcaagatgtgtatggtgaaagctgtactgcctgaaccctagtttgcagcggcctacaaccggagcggtgtcgtagaacgactgacacgacacaccgaatggacagaggacagggcgttgaggtcctccaaccccgatatcgggaaagccagcccattcggcgcatcctccatcggaggggtaagtgaacgaacggggcacctaaccacatcgtatctcccgctttcgtaattacgggatgccctaagcaggcatcggttctgccgatgacctgtatgggtacggagccgtcatagtactcaaatgcccggagtaatgaccgggacagccgaaatcatcggatggtcgagaatataagctcagggcaacttgggcgaaaattctgcggatcaggggaaggacggcagcgactacgatccaaaaccttgcgaagaggtgtgctaatgctgccagatactatcaaaagggctattggatcgctcccgatcattgttaggtcgggtcggcgggtcaatggactctatcgccttatgagggctccgctcctttgggagcaagcctaccataaaatcgcacagaataagggtgcgatgacaccgggagttgacggacagacctttgacggcttcacgtcggaaaagatatgttcgatcatcgaacggctggcgaatgggacctatcgcccgcaaccagtacgtcgggtgtacattcccaaagccaacggcaagaaaaggccgcttggtgtgccgacgacggaagaccgcttggcccaggaggttgttcgaattcttctggagcaaatctatgagccgctgttctcgcagcactctcatgggttcagaccgaaccgatcctgtcataccgcgttggaaaacatccgtgcggtgtggacaggggtgaaatggctggtcgatgtcgatgtggtcggatacttcgacaacattgatcacgacatcctgattggcttgcttgaaaaacgtatccacgacagccgatttatcggcttgatccgtggaatgttgaaagcgggctatatggaggattgggtttatcaccgaacctacagcggcaccccacagggcggtatcgtctcccctatactggcaaacatctacctccatgaactcgacgagtacatggaatcgaaggtcacagcctaccataggggcgggaaacgtgttccatcggtcgaaggccgacgaatcatgaatcgtctgacgcggcttcgtaagcaagtggatcagcttcgtcttgatcgaggcgatgatgatgcagagatcaaatccaaactggaggagatcagtcggctgaaggcggaacggttgaccgtgcctgccaccgacgcattcgatccgaattacaagcggctccgctactgccgttatgctgatgacttcttgatcggcataattggtagcaaagatgatgcgcggcagatcatggaagaggtgaggacattcctctccaaaaacctgaaactgagcgtatcggatgagaaaagcggcatccgcaaggcttcggacggagcacgtttccttggatacgatgtcaggacatcgaccaaccgcaatccgcacaaggcgaccttttatggtcgtcccgcactgcggcgagggttggcagatcgtttgaagctgaatgtcccaagggaaaaggtggtccggtttgtcaatggcaaaggatggggcgactacgatgcctttcgtcctcgccaccgtcccgctttgacactggcgagtgacgtcgaaattgtcatggcctacaacgctgaatggagaggcttcgcaaattactatgcgcttgccgatgatgtgaaacgcaagctcaataagggcgggtactttgccctgatgaactgcgtcaagaccatcgcggcaaagcacaaaacgtctgcgagggaaatcttcgccaagatgcgccgagggcaagacttcttcgttcgcttccaagtcggagaggaacgccgagagatcaagatctggcagctgaaggacctgaagtgcgaaccgcgaaaatggggtgacattgatcgcccacaatcatcaaagttcgtattcagcaggacagaaatggtcgaacgcctcaacgcgcagaaatgtgccagatgcggtcgaacagatcttccatgtgaaatccatcatgtcagaaagatcgcggaaatggaaaaggcggggcttgcccggtacatgccggcagcacgattacgcaagcgcattgtgctttgccagccctgtcatcgctccgtccatgctggtggccaagttgaccaacgacgtgatggaacacgtagtcgtggagagccggatgcgctgaaaggtgcaagtccggttcggaggggggtcgagccgcgtcctcattgaggtgccgccagcctaccctacccgaccagatcaaggggctcgacgggcatcatcaggcaaatgtcgatctctccgatccgctcgatcgcatcgggatggccggacgtttccttgccaataccggagcgctcatccgccatggcggttcgtccgcctactacgccgccgccaaggactacatccagatgccgattctcgacagcttcgtcgatgaggctagccacgttgccgtcctcagccacgaaat

SEQ ID NO: 66 - DNA, 2595 bp, Rhizobium matallidurans
  source 1..2595: mol_type = genomic DNA
agaagcgaactcggggaactgaaacatctaagtacccgaaggaaaggacatcaaccgagactccgcaagtagtggcgagcgaacgcggaccaggccagtggcaatgaggaataaagccgaacgacttggaaaggtcggccgtagcgggtgatagccccgtaggcgtagaacactcattgtcctagagtagggcggggcacgtgaaaccctgtctgaacgtgggtagaccactatccaagcctaagtactcgtgcatgaccgatagcgaacaagtaccgtgagggaaaggtgaaaagcaccccgacaaggggagtgaaatagaacctgaaaccggatgcctacaaacagtcggagcccgagagggtgacggcgtaccttttgtataatgggtcaacgacttagtgtaacaagcaagcttaagccggtaggtgtaggcgaagcgaaagcgagtctgaatagggcgatttagtttgttgcattagacccgaaaccgagtgatctagccatgagcaggttgaaggttgggtaacaccaactggaggaccgaacccgcatctgttgcaatagattgggatgacttgtggttaggggtgaaaggccaatcaaactcggaaatagctggttctccgcgaaatctatttaggtagagcgtctgacgaataccccggggggtagagcactggatgggctatggggactcaccgtcttactgatcctaaccaaactccgaatacccgggagtactatcaggcagacacacggcgggtgctaacgtccgtcgtgaaaagggcaacaaccctaacctccagctaaggtccccaagtcatggctaagtgggaaaggatgtgaggatcccaaaacaaccaggatgttggcttagaagcagccatcatttaaagaaagcgtaacagctcactggtctaaataagggtctttgcgccgaaaatgtaacggggctgaagccatgcaccgaagctgaggatgtgcagtaatgcacgtggtagcggagcgttccgtaagcctgtgaagggacagtcgtgagacatcctggaggtatcggaagtgcgaatgttgacatgagtaacgataaagagggtgagagaccctctcgccgaaagaccaagggttcctgcttaaagttaatctgagcagggttagccggcccctaaggcgaggcggaaacgcgtagtcgatgggaaccacgttaatattcgtgggcctggtggtagtgacggattgcgtaacttgtattcacttattggattgtgggtgcagggaagcggttccaggaaatagctccatcattatagaccgtacccgaaaccgacacaggtggtcaggtagagtataccaaggcgcttgagagaactatgttgaaggaactcggcaaattgcacgcgtaacttcggaagaagcgtgaccccattgtacgcaagtgtgatggggtggcacagaccagggggtagcgactgtttatcaaaaacacagggctctgcgaagtcgcaagacgacgtatagggtctgacgcctgcccggtgctggaaggttaaagggagaggtgcaagctttgaactgaagccccagtaaacggcggccgtaactataacggtcctaaggtagcgaaattccttgtcgggtaagttccgacctgcacgaatggcgtaacgacttccccgctgtctccaacatagactcagtgaaattgaattccccgtgaagatgcggggttcctgcggtcagacggaaagaccccgtgcacctttactatagctttacactggcattcgtgtcggcatgtgtaggataggtggtaggctttgaagcggggacgccagtttccgtggagccatccttgaaataccacccttatcgtcatggatgtctaaccgcggtccgttatccggatccgggacagtgtatggtgggtagtttgactggggcggtcgcctccgaaagagtaacggaggcgcgcgatggtgggctcagaccggtcggaaatcggtcgtcgagtgcaatggcataagcccgcctgactgcgagactgacaagtcgagcagagacgaaagtcggtcatagtgatccggtggtcccgcgtggaagggccatcgctcaacggataaaaggtacgccggggataacaggctgatgacccccaagagtccatatcgacggggttgtttggcacctcgatgtcggctcatcgcatcctggggctggagcaggtcccaagggtttggctgttcgccaattaaagcggtacgtgagctgggttcagaacgtcgtgagacagttcggtccctatctgccgtgggtgtaggaatattgacaggatctgtccctagtacgagaggaccgggatggacatatctctggtggacctgttgtcgtgccaacggcatagcagggtagctacatatggaatggataaccgctgaaggcatctaagcgggaaaccaacctgaaaacgagtattccctatcagagccgtggaagacgaccacgttgataggacgggtgtggaagcgcagcaatgtgtgaagcttaccgttactaatagctcgatcggcttaattgttctcattgataatgctcatc

SEQ ID NO: 67 - DNA, 2532 bp, Rhizobium matallidurans
  source 1..2532: mol_type = genomic DNA
tccttcctaggcttttcagcgatcatcgcttccgtcgtcaccagcaggccggcaacggatgcggcgtcttggagcgcggtgcgcacgacctttgccggatcaatgacgccctgcgcgtagagatcgccatactcaccggtctgcgcattccagccatatgacagctcgctcttttcccgcagctttccaaccacgatcgatccctcggcgccggcgttttccgcgatctgcctgatgggagcctcgatcgcccttcggacgatgtcaatcccgacgcgctgatcgtcgttggcggtcggcagaccgtggagtgcattcaccgcgcgaagcaatgcaacaccgccgcccggaaggatgccttcctcgacggcggcccgggttgcatgcagggcgtcgtcgactcggtccttcttctccttcacttcaacttccgtcgaaccgccgacccggatgacagcaacgccaccggctagcttggcaaggcgttcctgcagcttctcgcggtcgtaatcggagctggtctcctcgatctgcgcccggatctgggcgacgcgaccatcaatttcggccttggagccgacgccatcgatgatggtggtgttttccttttcgattgccaccttcttggcacggcccagcatgttcagcgtgacgttttcgagcttgatgccgacatcctcggatataacagtgccgccagtcaggacggcgatgtcttccagcatcgccttgcggcggtcgccgaagcccggcgccttgacggctgcgatcttaaggccgccgcgcagcttgttgacgaccagggtcgctagagcttcgccttcgacgtcttccgcgatgatcagaagtggcttgcctgacttcaccactgcttccaggaccggaagcatggcctgtaggttcgaaagcttcttctcgtggatcaggatgtagggatcctcgagttcgacccgcatcttgtcctggttggtgacgaagtaggggctgaggtagccgcgatcgaactgcatgccttcgacaacctcgagctccgtctccgccgtcttggcctcctcgacggtgatcacaccctcattgccgactttttccatcgcctcggcgaggtaacggccgatctcttcatcgccgttcgccgagatcgtgccgacctgggcgatctcggaattgctggtgatcttgcgggcgttggtcttcagttccctaacgacggcgtcgacggcgatgtcgatgccgcgcttgaggtccatcgggttcatgcccgaagcgacagccttggcgccttccttgacgatcgcctgtgcgagcacggtcgcggtcgtggtgccgtcgccggcaagatcattggtctttgatgccacttctcgcagcatctgggcgcccatgttctcgaatttgtcttcgagctcgatttccttggcaacggatacgccgtccttggtgatgcgcggtgcgccaaaggacttgtcgatcacgacgttgcgcccctttgggccgagggtcaccttgaccgcattggcaagcacatcgaccccacgcagcatgcgttcacgggcatcggtgtggaatttgacttctttcgcagccatttgtctaactcctcaataggcagctactgactgatagtggtgggtatacgaaacagcccgtcaggccgccttcttctgctcggcttgaacgtcaatgatgcctaggacatcactttccttcatgatcagcaggtcctcaccgttaatcttgatctcggtgccggaccatttgccgaataggatgcgatcgccagccttgacctcgagcgcctggatctggccggcctcgttacgcgcgccagtgccgacagcgacgacctcgccctctgacggcttctcctttgcggtatcggggatgatgatgccgcccttggtcttttcctgggattcgacccggcggacgagaatgcgatcgtgaagtggtcggaacgacatgttttcctccattgagcaaaaatgatgacgttgaaaccctaccgaaccggatgaccagtccgggcgggtgcgaacctcaaacgagcgttggcgggcaaaatttattttcgagatttttcgatttcaagagggtcgataagaaaaattagcactcggcgtcgttggctgctaacatgctggaaagtaacaataaacagcatcgccgaattcaaaaaaccattgatgagtgcaagattttaagtcaccttcgcagcgtcatgaaacggagatgaagcatgcaattctcgtcggatctggagcgtcagctcaacggctacgggctgaccaccgcgcatatcctctaccgcattcccgacttcgaatccgtcctgcaaacctacgtctggcaggactatgatctcgcacctgattttccggagatgcacaagttcctcggcttctggcaggcgaacctcgacgggcctctccactctgtccgctattcccaccagcggctgatcgggccacacgaatggcgccgtgtcgagggcgagttcaagctccattgaactcttgattttgatttttcgtc

SEQ ID NO: 68 - DNA, 2509 bp, Rhizobium matallidurans
  source 1..2509: mol_type = genomic DNA
cagctcgagggctccaagggtttcaccaaggacatctgcgcccgctacgatatccccaccggcgcctaccagcgcttcaacaacgcccccaaggccaaggcctatatccgcgagcagggcgccccgattgtcgtcaaggccgatggtcttgccgccggcaagggcgtgactgttgccatgaccgtcgatgaggcgctggccgccgtcgacgattgcttcgaaggcgcgttcggtgccgccggcgccgaggtcgtggtcgaagcctatctcgatggcgaggaggcaagcttcttctgcctgagcgacggcaagcacgcgctggcgctcgccaccgcgcaggaccacaagcgggtgggcgagggcgataccggcccgaataccggcggcatgggcgcctattctcccgcccccgtcatgacccccgagatggtcgagcgcacgatgaaggagatcatcgagcccaccatgcgcggcatggccgaaagcggctatcccttctccggcgtcttcttcgccgggctgatgatcaccaggaagggcccggagctgatcgaatacaacgtccgcttcggcgatccggaatgccaggtgctgatgatgcgcctgaagagcgatctgctccccatcctttatgcgaccgccaccggcacgctggacaaggtcaccgccgaatggagcgacgatccggcgctgacggtcgtcatggcgtcgaagggctatcccggcggctacgacaagaacacaccgatcacgtccattcccgaagcgggcgagggcgccaaggtgtttcacgccggcacggcgctgacggatggcgccctggtcgccaccggcggccgcgtgctgaacgtcacggcgacaggaaagacggtcggcgaggcgcaatcgcgcgcctatgcgctgctcgatcaggtcgagtgggacaacggcttttgccgtcgcgacatcggctggcaggcgatcaagcgcgaaaaagcgtaatcgcgcgccggattcgggtcagttccataaacttttaccctttcctctgacgggatggaaataaagccgcgctaaacctgtgttcaaggttagacggagtgtttccatgcgtcaggtttttatggggcgtcaggttttgatgggtgtcgttggcgcgctgatggcgggttccgccatggcgtcgtcgatcgacgtggtcggcgccaaggcggtctcggccaatagcagtatcatgacgatgcgctgcaccacatgcccgccgcttcaggtcgtggaagcgaaaaaggaatacatcgttccgacgctcgccagtggcacgctcgagcagtcgcagatccgcgacgtcgacggtgaaaggaagctctttcgcaccgaaggctggatgggcggttcgccggtcgtcttcgtgaccaaggcgccggcattgtcggtggctgccgccgcgcctgtcgttaacggcgcggatggcgtcgacatggccaccacctcggcggtcatcggcggcaacgtgaagccggttgccgctggcgtcgccgggcatcaggcggaacaaacgcgcccgctcgacgtttctaatttcaagcttcggccctgatttaaagttccctgcccctcccgtccaaggttttggtcatctggggttccacctcgaaagggtggatgaaatgcgctcctgaagagaagcaggggcgcattttttatgtcgcgaggcactgggccgtcagcccgcctgtggccgatgtcgagtttgggcgatcatctaccccgtggttaaggatttcttataaaaaacaggccatttctagccacgaccggtagccgcatgagtttttcgcagcagtaccagcgtcgacgcgatgtcgccgacgcatacgcggtaggataccgcgccggatgatgtcacccgacacatgttgcgaggccttatgaagaatctcagaatttccaggcagctgtttctgctcgtcgccggcttgatggtggccttttgcgccgcctcctacctgcagatacgctcttcgatcgatgcgatctatttcgagcggagcgagatgctgcgcacgcaggtggaatccgggctatccatcatccagcaatattacgaccgcgaaaaatccggcgaactgacgcgcgaacaggcgcaggcgctggcatacaagcagctttccgcgatccgcttcgagcccaacggctatttcatcggctatgactacgacgtcgtcatgcgcatcacctacgacacgccgaagctcggcaagagcagcaagggctctcccgacagccgcggcaagccctaccgcgacgagatcgtcaaggtcggtcgcgccggtggcggtatcgtcgatttctacggcccgaagccgggcgaggcggccgatgcgcagttccgcaaggccgtctacaccaaggcgttcgagccctggcaggtggtggtcgcgaccggcgtctatctcgacgatctcgacgcgcaggtgcgcgccgacatcctgaaggcgctgtcgggcggtctccttgtactgcttctcgg

SEQ ID NO: 69 - DNA, 2351 bp, Rhizobium matallidurans
  source 1..2351: mol_type = genomic DNA
aggcttttcatgaagttacgtcaaaatcattccgtcacggttgctgctgcaaaagccgagatcggccgcacgacagctttccggatcgagaaggatccgcgtctgccatctcaaaagacaaaaccgcgagagcgccggcgtccggatccactggcccatatctttgacgccgagatcgtgccgctgcttcaggctgcgcccggaatacgggcggtggcgatattcgaggagatgttgcgccgccacccggagcttggggacggcattcgtcggacgatggagcggcgcattcgctcctggcgcgctgtgcatggcgcagagcaggaggtcatcttccggcaggttcacgagcccggccggttgggcctttcggatttcaccaacatggatagtctggaggtcacgatcgccggccagttgctcgatcatctcctttatcacttccgccttgcctattccggcttcgaacatggtcatgtcatcctcggcggcgagagctttgtcgccctggcggaagggctacaaaacgccctgtggtcccttggcggcgcgccgcatgaccatcgcagcgacagcctgtcggcggcgttccgcaacctgactgccgacgagcaggaggatctgacgcttcgatacgaggaactttgcgctcactatcacatgaagccaacgcgcaataacaaaggcatcgcccacgagaacggctcgatcgagagcgtgcacgggcatatcaaggcagagatccgtgatgcgctgctcatgcgcggcagcaacgacttcgacgatcttgccgcctaccgtgccttcatcgatgagatcgttagccgccgcaatgcccacaatctcaagcgtatcgaggcagaaagacctcatcttcaggacctgccgcagcgcaggacgacagacttcgaggaggtggttgtcagggtgatgcgcaccggcggcttctcgctgcgcaaagtcttctacagtgtgccttcccgcttgatcggtcatcggctacgggtgcgcctcttcgatgaccgacttgatgtgttcgtcggcggcacctatctcatgacgctttcccgagggcggggacatccagatggtcgccacagccaggtcgtcaattaccggcacgtcattcactccctccgtcagaagccgatggcgctattgcggctcgtctatcgagaccagctcttcccgaggctggaatatcggcaaaccttcgaggtcttgctggagcggctgaccgacaagcaggcctgcaagaccatggtcgagatcctggcgctggcccatgagcgaacctgcgaacgcgaactggccgagcaactggccagaacgttggatgccggcgagcttcccgatatggctgagttgcgaaagcactttgcgcccgaccccaccgccttacccgtcgtctccgtccatctggcaccgctaagcggctacgaggtccttgtcagcgccgaccaggtgggagaacgcgcatgaccaatcccaatgatatcgatgctggccgtctgagcattatgttgaacgagcttcgcttgccggcgatcaagatgctttgggcagactttgcccaacaggccgacagagagggttggcccgcggcccgcttcctatcgattatcgccgagcatgagcttgccgaacgtgacagacgcaggatcgaacgccatctgtccgaggccaggttgccgccgggcaaaacgctcgacagctttgccttcgacgccgtgccgatgatctccaaagcgcagatcatggcgatgacggcgggagatagctggctggcgaagggggctaatgttctcatgttcgggccgccggggggcggtaaaagccatcttgcggcagccatcggcttggcgctggtcgagaacggctggcgcgtgctcttcaccaggacgacggatctcgttcaaaagctccaggtcgcgcgacgcgaactgcaactggaatccgccatcaacaagctcgacaagttcgatctgcttatcctcgacgatcttgcctatgtcgcaaaggatcaggctgagaccagcgtcctcttcgagctcatctcggcacgctatgagcggcgatctatcctgctgaccgcaaatcagccctttggcgaatggaacaaagtttttccagatcccgccatgacgctcgccgcggtggatcgcctcgttcatcacgccacgatcttcgagatgaacgtcgagagctaccgtcgccgctcagctatggaggcaaaacggcaacgcgggcggcctccaatctacgcgacaatcaacgaggctacacagattgacgctccgcgacaattagaagagcaatgaccgcttgccagcgtcaatcacgctgctaaa

SEQ ID NO: 70 - DNA, 2332 bp, Rhizobium matallidurans
  source 1..2332: mol_type = genomic DNA
ctcggcagtcacggccccgcctattacgcccgctaccccgaggaatttcgccgtttcacaccggattgccgcgccaacgatttcgtggcctgctcgccggaggaaatacgcaatgcctatgacaatacgatcctttacacggatcacgtcgtctccacggtcatcgacaagctgaagaagcgctccgcgacgctggccgcatcggcgatctacatgtcagatcacggcgaatcgcttggcgaaaacggcctgtacctgcacggaacgccgtatgttctggccccggcgcagcagacaaaggtgccgttcctggtctggatgtcggacgacctgcaggcgtcggccggctacgacatggcatgcctcgcgacaaatgcgaaaaagacgacctcgcacgacaacttcttccatagcgttctggggatcaccgacgtttccacgaaggtctacgatcccgcgctcgacgtcttttcaagctgccggaagggcaacatgcgggtcgccagcgtggcgaccggcgtgaactgagacgctggttgcaaatcgcgaccgcgatcatgcgcctgggtcgcgtcggcgcgctcggcccctctaacatggcaatagtatagatccgcgtccgtcgcgcaagtatagcgacgcccggcggtcacgctgtcgcaataatgtcacttatctttcaggtagttgtcagccgctcgcggcatagcttggcctctcggataattcctggagatacttgtgcgagcattgaaacgacttcgcgttccgcgccccgtaaaggttatcggcggccttgttctgttggccgccctgacgtttggtggctatgccggctatctccagttcaccggaaactttcataccgtcattgccggtcaattctaccgctccgcccagccgtcgccggcgcagctcgagcgttacatccgcgattacgggatcaagacggtcatcaatctccgcggcaacgcgggctatgcgaaatggtgggccgaggaggtcgcggtagcggaacgtctcggcgtgaagcatgtcgatttcggcatgtccgcctcgaagatactgtccgctgaacgggccgacgagcttctcgccatcatgcgcgacgctcccaagccgatattggtccattgcctctccggcgccgaccggaccggattggcttcggtcatgtacagccagcagatcgcgaacatgaaggaggacgtcgccgagcgtcagctctccttcgcgttcggacacgtgggtatcccggttctctcgtcggcatacgcgatggataagacctggaagaacctcgaaaggcacttcggcgttggtgaaggcgagggcaccgcgtctgtgcgcgacgtgcaggctgaaaccatcggcaccgatcgcggggccggctaaggcatgcgccgatcccgcgcccggaatacaggcaagcaaaaggcaagcatccatgaatgtgctattggtcgaagataaccccgtccttggcgacgccgtttgcgaccatgtctcggcgaacggacacgatgtcgaatggtgtcagacgcttgcggatgcaacagctgccgccgaccgcggggatcacgcgctggtcctgctcgatcttcgccttcccgacggcaatggcctttcgctgcttcgccgtctgaggagcagaagcaacgacgtcccgatcatcatcctgaccgcccacgaccaggtctccgatcgaatcgagggcttcagctgcggtgcgacagattatctggtcaagccgttcggcctgtcggatctcgataacaggatgcacgcggtgtgttcgaaacaccgcggcaattgcctgaaaacgtaacgctcacgaggacttgcgggatacgcagccggaaaacagatcgagcttctggtcgtaggcttttgtcgtcacgttcatcatccccagcacgctgtgaaagagattgtcgtgagacatcggctgtgtccgggactgcgcgacgcaggccatgtcgaccatcatcgatttctggaagtcctgatcgagccagacgaagaagggcacgcgcgtctgctcttcgggggcaaacatgtaaggcgtaccgtgcaggtagagacctttctcaccaagcgattcgccatggtccgacatgtagaccatgctcgtcgccatcgttccactccggctcttcagcctgtcgatgaccgtcgacaggaagtagtcggtgtagaggatggtgttgtcataggtgtttacgatctcgctgtccttgcagttgccgagctctgaagtcatgcactcaggcttgaatttccgaaatgcttccggataccggatatagtaggccggtccgtggctacccat

SEQ ID NO: 71 - DNA, 1861 bp, Rhizobium matallidurans
  source 1..1861: mol_type = genomic DNA
tggggccttataagccgcttcacagaacgagggcggcggcgctgctggcgacggtgactttcgctctggatttctttgaattggctgcgatgctgattggttccgggcttagggtttgggacggggaatttcgactgggttatctggtctgttatttgacaattgaagatgagaagaaagagaaacgtgggcggcggagttcgcgggactgacagagatgtcggttctttgaaagagactttggcggtcacgtttatcaagagaagttacactggtctttggtgtttgggtttcggctcaggcgcttagaggacaggtgtgaagttctcgtcgattcagaacgtgacgtaaatgccaatgattgaattctcaacatgagagtttgatcctggctcagaacgaacgctggcggcaggcttaacacatgcaagtcgagcgccccgcaaggggagcggcagacgggtgagtaacacgtgggaacgtacccttttctacggaataacccagggaaacttggactaataccgtatgtgcccttcgggggaaagatttatcggaaaaggatcggcccgcgttggattagctagttggtggggtaaaggcctaccaaggcgacgatccatagctggtctgagaggatgatcagccacattgggactgagacacggcccaaactcctacgggaggcagcagtggggaatattggacaatgggcgcaagcctgatccagccatgccgcgtgagtgatgaaggccttagggttgtaaagctctttcaccggagaagataatgacggtatccggagaagaagccccggctaacttcgtgccagcagccgcggtaatacgaagggggctagcgttgttcggatttactgggcgtaaagcgcacgtaggcggatcgatcagtcaggggtgaaatcccagagctcaactctggaactgcctttgatactgtcgatctggagtatggaagaggtgagtggaattccgagtgtagaggtgaaattcgtagatattcggaggaacaccagtggcgaaggcggctcactggtccattactgacgctgaggtgcgaaagcgtggggagcaaacaggattagataccctggtagtccacgccgtaaacgatgaatgttagccgtcgggcagtatactgttcggtggcgcagctaacgcattaaacattccgcctggggagtacggtcgcaagattaaaactcaaaggaattgacgggggcccgcacaagcggtggagcatgtggtttaattcgaagcaacgcgcagaaccttaccagcccttgacatgccacgatcgctgcagagatgcagttttcccttcggggacgtggacacaggtgctgcatggctgtcgtcagctcgtgtcgtgagatgttgggttaagtcccgcaacgagcgcaaccctcgcccttagttgccagcatttggttgggcactctaaggggactgccggtgataagccgagaggaaggtggggatgacgtcaagtcctcatggcccttacgggctgggctacacacgtgctacaatggtggtgacagtgggcagcgagacagcgatgtcgagctaatctccaaaagccatctcagttcggattgcactctgcaactcgagtgcatgaagttggaatcgctagtaatcgcggatcagcatgccgcggtgaatacgttcccgggccttgtacacaccgcccgtcacaccatgggagttggttttacccgaaggtagtgcgctaaccgcaaggaggcagctaaccacggtagggtcagcgactggggtgaagtcgtaacaaggtagccgtaggggaacctgcggctggatcacctcctttctaaggaagc

SEQ ID NO: 72 - DNA, 1495 bp, Rhizobium matallidurans
  source 1..1495: mol_type = genomic DNA
cagactgctgacaaaccccgtcattttttggcggggtttattttgttctgagttgcgcgctggatcggctgttttgaacgaggctttcggatggtcgctttctcatgcggggctcggttggctggccttggtgagggccattgcgatcttcttgatgttctgggcggttgcggccatcaggcactggcattggacccggacgagacttcggaaccgcgcgtagcggtggccatgcagttgtttggcgtcggcgaaggatcgctcgaccgtctccttgcgccgtttatagaccgccttgccccagggcttgagccggttggcatcggtgcgctcgcgcgcatcggcccagacatggcgggtgatggtgcgtaccgccttgccgttcgatgtgcacgacgccagtagcgggcaatcgcggcagatcgccggatcggatgtatagtggcgatagccgttgcggtcggtggtggcgtaggtaagcaactggccttcggggcaacgatagccatccacctcggcgtcatggacgaacttcgacttgcgcatcatgccggctttcggcggggtcggattgcggtagccggtgacgccgaggatggcgcgatcctccaggccgttggcgatgcccgaagtcgcatagccggcatccaggcccaccgccttgacgtcgaaagagaagcgctcgcgctggcggtccagccggtcgaggtagacgatgctgtcatgcacgttggccggcgtcgcatgggtgtcggtgatgatcgcatgacggccatcgacggtgcgatgatcgagatagaagaagcccttgggcttgccgtcgcgcaccatgtagccgctgtcgggatcggtgcggctgaccttggtctgcttgatctcgggctcgcgctccttctccttcaagggcttctggccatgcagcgcccgctcggcctcgatcgccctgtcgagatcggcccagtagtcggaacgcgacttggcgaccatctcgagatcgtacttgcccttgttggcattggccttcagatgcgtgctgtcggtataaagaacggtgccgtcgaccaggccatggccgatcgcctgttcgacgatgtggtcgaagatgtcctgggcgaccgacgtatcgttgaagcgccgccgccggttctggctgagcgtcgaggcatcgaacaccccgtccgtcagcttcatccgcagaaaccagcgataggcgacattgacctcgatctcgcgcaccagctgacgctccgagcggataccgaacaggtagccgatgaacagcgccttgaacatcaaggtcggatcgagcggcggccggccgttgtcggcgcaataaagcccggcaacgcgatcatggataaaggtgaagtcgatcaccgcatcgatcttgcgaagcaggtgatccttgggcaccagactgtcgagcgtcaccatctcgagagccgtctgttcgggagcaggtttcttcagcatgtcccagtgaatcacaaacccc

SEQ ID NO: 73 - DNA, 1396 bp, Rhizobium matallidurans
  source 1..1396: mol_type = genomic DNA
tctgtggttgccgcccacaatgcaagagggttcagatcgaatgcgcgcgtgatcgagtgcggtcttctgtcaggccttcatatgcggcatttcaggaagccgcgggccggtatggtgatcagcggatcaggtccaaatctcatttccgagctttatcgctcgcaggctctaactggttttcctgatccagatctgttcgatcattttgcccattcgggtcgtcgccttctcacacctccctttatccgatgtcagatagattatactgcatgtcgatcatgctgctgctacctgcgccgaatctcgataatcctcgttctttgtcagcaaagcccaaatcatccgcgccatcttgttggcaagcgcaatcgcgacaagcattcttggctttcgcgcggcgatgcgtgccagccacgagctttccgggattgatctacggccaagccaatttaggcgtgacattgctccgataatcaaaagtctacgaatatcactttgtcctgcttttgatacacggcccagacgttctttgccgccagaggagaactggcgcgggacgaggccaagccaggcggcgaagtcccggccgctgcggaagctctccatcgagggagcgaaggcttcgacagccaaggcggtcaatggaccaattccagggatcgtctgcaagcgccgggcggtatcagcttcggctgcgagagccttgatctttgttgtccgggcgttgatgcgggccgtcttctcggcaatctgcatcatcagatcaccgcactcgtcgcgcatcacttcaggcaggtcgctgttcggttcactcagaatctcttcgatcctgctcagctgacgaagtccctgcggaacaatgtggccgaattcgtagagacaggcccggagggcgttcatcagctccgtgcgctggtgaaccagtcgctctcgagcacgaaacagaatggcacggctttgctgctccgtagacttggactcgacgaagcgcatttctggtcgctgtgcagcaatcacaatggcttcggcatccgccgcgtcgttcttctgccgcttgacgaacggcttcacgtattgcggagcgatcaatttcacatgatggccgagcttgatcatctcgcgggcccagtaatgcgcgcttccacaggcctccattactacgacggcaggagggtgcttcgccatgaattcagcaaagccccgccgcgacagcttcttgcgaaacttcggttgccctttcagcgatgcgccgtgcagctgaaaaactgactttgccagatccaccccgatcatagtatccttcgtcacggttgccgtcctttccactcattggccttaacactactaacttggcacattgcgatgccgtctggggagggcggcaaccaccccatct

SEQ ID NO: 74 - DNA, 1393 bp, Rhizobium matallidurans
  source 1..1393: mol_type = genomic DNA
gaccacgccgccgcgtcgcaagcgcggcatgacccgcccggtgctgttcgcgctgctgcccgtcgcgctcgtggtcggcggctattattacgtcaatggcggccaggtcatgtcgaccgacaacgcctatatcaaggccgacatggtgggcctgacgaccgacgtttcgggcctcgtcgacacgatcgacgtgcgtgaaaacgaaacggtgaagaagggccaggtgctcttcagccttcgccaggattctttcaggatcgcgctcgacggcgccaaggcgcagctcggcgcggtgcgcaaccagatcctcaacctggaggcaagctaccagcagtcgctggcggagatcacgcaggccgaggccgacattccctatttccagaccgaattcgaccgccagcagaacctgctgaacagctcggcggccacccgcacggcgttcgaccaggccaagcacaacctgcaggccgggcagcagaaggttgccgtcgccaaggcgcaggccgcggccacgctcgcccagctcggcggcaatgccgaccagccggccgagcagaacccgctctatctcgaagccaaggccaaggtcgacgacgcgcagcgccagctcgaccacagcgtcgtccgggcgccgttcgacggcatcgccaccaacgtcaattccttgcagccgggctcctatctcgaggcatcgacgcaggccttctcgctggtcgcggccaacaatctctggatcgatgccagccccaaggaaaccgagctcacctatgtgaagcccggccagacggccaccatctatgtcgacagctatccgggcgtgaccttcaagggcaaggtcgagagcatcagcccggcttccggctccagcttctcgctgctgccggcgcagaacaccaccggcaactgggtcaaggtcgtgcagcgcattccgatgcgcgtcagcatcgaggataccgccggcaagccgccgcttcgcgtcgggatgagcgccgtcgtcgatgtcgataccggtcgtgcgcgcggcctgccggatttcgtgtccaagcttctgggccgctcgggcggagacgatgagtaacgccgccgccgcctccttttccccggtcgccaatcgcggcatgatcacggcctgcgtcatccttgccgtcatcatgcaggcgctggatacgacgatcgccaacgtggcactgccctatatccagggcagcgtttcggcgagcgccgaccagatcaactgggtgctcacctcctacatcgtcgcggccgccatcatgacgccgccgtcgggctttctcgccgccaagttcggccgcaagaaggtgctgctgacggcgatcatcggcttcgtcgtcgcgtcggtgctgtgcggcctggcgcaatcgctgaaccagat

SEQ ID NO: 75 - DNA, 1217 bp, Rhizobium matallidurans
  source 1..1217: mol_type = genomic DNA
ctgaacgccctggtcaccgagggcctgagcgagaacctgtcgatccagcagtcgctggagcgcatcaatgccgccgccgccggcgtcaccgtcgccggtgcgggctcgctgccgagccttgtggtcggtgcatcgaacaccacgagcggcgacctcggctcgctggccaccaccaaggccgccaccaacacgaccggcgccaacgccaacgtctcctggctgctcgacctgttcggccagtatcgccgttccaaggaaagcgcccaggcctcgctcgacgccgcctactcgaccgccgacgtcgccaagctcacctatctccaggatctggtgaactcctacatcaacgcccgttactatcaggagcgcatcgcgctctcgagagccaacctgaagtcgcgccaggaaacctacgacctgaccaagttccagctcgatgccggcgccgcctcgcgtctcgacgtcgtgcaggcggaaggtctggtgcagtcgacccaggctgaaatcccgggcctggaaaccagcttccgcatcgccgcccaccgcatcgccaccctgctcggcaagccggccggctcgatggtcgcggacctgcagcgcgccggtccccagccggtcttccgcgccggcatcgtctccggcgttcccgccgacctgatccgcaaccgtcccgacatccgcgtcgccgagcgcaatctcgccgccgccaccgccaatatcggcgttgccatgtcgcagctctatccgtcgatctcgctctccggctcgatctcgccgagctatatacgccctgtcggcgccaatggtggcctgaccagctggtcgttcggcccgacgctgacgctcccgatcttcgacggcggccgcctgcgcgccaatgtcgacatagccaagtccgacgccaagacccagtacctcgcctggaagcagacggtcctgcaggcggtcgaggaagtggaaaacgcgctgtcggcggttcgccgcgacgcccagacggtggccgcgctgcgtgcccaggtcaagacgacccaggaaacgctcgacctgtcgaccgccagctacaaggacggcgcctcctcgctgctcgacgttctcgacgcccagcgtcaggtgtcgctggcccaggcaagcctggccgccgccgtccagcagatggccatcgactacgtctcgctcaacgtcgccatcggcggcggctacaacccgggcggagcaac

SEQ ID NO: 76 - DNA, 1112 bp, Rhizobium matallidurans
  source 1..1112: mol_type = genomic DNA
ctgctgaaggccaggacgtatcgaagcgagaaaggcatggcggctccccattcgggcggccgaacgcgccgccatgatcatgctgaaggaatgcgtttcatgtcaggcgctgctcgagcgacggtggatcgctcgcctattgtcaatgctgtctgaatgccggcggactgcgtttgggcgctcgtggcgtggatgccgcttgcgccgtgcatgctgtcgatatcggtcggccgggcaattctcccggtaagcctctggatttcaatataaacgggtggcgcgtcgaattgcaaatcccggtgggttgaaattctccgagctaataaaatcatgaagggtgccgggcgacgcttccattccgacgcgttcgccggcattttcgttagccgggtgcgacaatttggtcgcatatgacgaatatcaagcagaggtggcttgtatgttgcacctgctcaatatatctaggcacattataagtgtgcttactattggcgcagtcttcaatgaacagcaatccgaccctcggcttcctcctgcatgatgtcgcacgtctgcttcgaaagcgtttcgagcagcgggcgaagtgtctcgggctgacgtcgtcgcagtggcaggcgctggcgtatctctccaacaacgaggggatacaccagggtgggctggcggaaatgctggagatcgagccgatcacacttgtacgcattctcgacaagctcgccgagcgcgggctgatcgagcgccgccagcacccgacggaccgccggatctggctgctttacatgcgcgaggaggcgcatccgcttctggcggaaatgcgcggacttggcgatgtgacgcgaggcgaagccctggaggatgttgccgccgaagagcgggagcagcttttccagatcctgtcgcagatgaagaccaacctagtgcaggcctgccggacccccctggcattggccgaaaacgagaccaaccatggctgataaaactcccctgcgcgtcgtttccgacgccgatgccaacaccgccgccgaaacgaacgaggtttctccccgcgaggaaaccgtcgccgaggcgccatcctccaatacggcgcctgtcaccgccgtcgcgccgcccgt

SEQ ID NO: 77 - DNA, 960 bp, Rhizobium matallidurans
  source 1..960: mol_type = genomic DNA
tgtggaattggtaagacgcccccgacaagtcttcgacttgtctagggatgaaccttcccgtgctttttagaacatagatggcgccagtcaggcgaccatcgaaacgcaatacgccacggaattacttcggtaatcggatggtatggcgcactgcgccgtccacgtttctctttcttcattaggatatgtcctcacggcgagcgcgatcttcaatcgctgcctccggccaatcttcgggttggaaaagaggcgccagacgactggcgacggcctctggcctgtatgggcgagcgtcactgacgtcgagttcgtagagatcgggcctgtagctcagttggttagagcacacgcttgataagcgtggggtcggaagttcaagtcttcccaggcccaccattctcctttttgaggatgatgggttgttcgatcttaatcctcctgatgggtttgctcatcaggtgttgcgatggttggggctgtagctcagctgggagagcacctgctttgcaagcagggggtcagcggttcgatcccgctcagctccaccaattcgcttccgagaggagacgatggtgtcgagatggcggatacatatcctttgaagaaataaaagtttgcatcgacttcggtcagatgcctgttctgcatatatcgtgaagagaagattgatctggaggcttccaggtattttggcacaatccttacggattgtccgagatgtccgagcccagttccaatgacgtcgtgaatggcctagccggccggaagcgaaagagggactggaggtaggtaggaagcttgtcgctctggatcgtcgttgttcggtgtcttcgacactgtctgacggacgatcggattaccgttgcctgaccgcgcggtaccggatttaatctcgagaagctggtcttaaagatcggacacaagcgaactgctcggcgtagttccaataaagtgatccga

SEQ ID NO: 78 - DNA, 900 bp, Rhizobium matallidurans
  source 1..900: mol_type = genomic DNA
gaacacgacgttctgcgcctcaagggcttcgtcgatgtccccggcaagccgatgcgcctgcagctgcaggcggtcggcagccgcatcgaccactatttcgaccgcgcctgggcatccggcgagacgcgccgcacgcggctggtggtcatcggcctgcacgagatggacgagggcgcggtgcgtgaggcgatcgagggtctggtttaaggttgatggttggcatgggcggttgtcgatttgaggatggtttgactggtgcggtgtggccccctcatccgcctgccggcaccttctccccgtgggggagaagggatatgccgcaacgtctcgtttcctcttctccccagcggggagaaggtgcccgtagggcggatgagggggccgcgcactctacgcctgcgaccaatatttcccgtaaagacctaacgccatgcaccttcttctagcccagcagggaacgatcagcgacggcgaggaggcgatcgatcttggtcagtctcccgccgacatcctgttcctctccgccgccgacacggaactggcggcggtggcggtcgcgcagggccggcgttccggcgcgcggtcgctgcgcatcgccagcctgatgaacttcaagcatccgatgtccgtcgatgcctatgtcgagcgcacggcgcggcatgccaagctgatcatcgtcagggcgctgggcggcgccagctatttccattacgcgctggaggcgctgcatgcggcggcggcccgacacggcgcgctgatcgcggtgctgccgggagattcgaaaccggacgcgggcttgacgccgttttcgaatgtaccgctcgaggatctgaatgcgctctgggcctatctgatcgagggcggtgacgcgaatacgcatgcgtttcttgattatgccga

SEQ ID NO: 79 - DNA, 870 bp, Rhizobium matallidurans
  source 1..870: mol_type = genomic DNA
cctgattgctttattggagctacgccgagcagctcgcttgcatcaggtcttaagaccagcttctcgagattaaatccggtaccgcgcggtcaggcaacggtaatccgatcgtccgtcagacagtgcaacaaggcaccgaacaacacgcacaaaccgctatgcggtttgcactgacaatccagagcgacaagcttcctacctacctccaatccctccaccacatccggccggctaggccatccatggtttctcaggaactgggctcggacgtcaggtcaaaaacccaacacctggaagcctccagatcaatcttctcttcacgatatatgcagaacaggcatctgaccgaagtcgatgcaaacttttatttcttcagaagacattgccatcaaaaccctcaggctcgacaccatcgatttggtggagctgagcgggatcgaaccgctgaccccctgcttgcaaagcaggtgctctcccagctgagctacagcccctccagctcgatcaccccgaacgtttccatccaaggctcggcaacaatccataatcccttcaaggcgctcaaagcacccaaatccaacagtcactcgaagtgaatggtgggcctgggaagacttgaacttccgaccccacgcttatcaagcgtgtgctctaaccaactgagctacaggcccaatctcgatgaaagggtttacggttttgtcttcatgaagaaagagaaacgtggacggcgcagttcgccataccatccgagtgccgaagcacttccgtggcgtattacgttgcgatcgtgatctgactgatccgatcttgttctaaaaagcattggtaagctcatccggagcgtgtccggcatcttgcaatatccag

SEQ ID NO: 80 - DNA, 866 bp, Rhizobium matallidurans
  source 1..866: mol_type = genomic DNA
taggctgtggtgacaaattaactatttgatccatagcatgatgcttgcgagctttatgaagccgaggaagttgtcggcgagcttgtcgtagcgcgttgcgatacgccgccattgtttgagcttggcgaagaagctctcaatgccccatcgctgcttgtaggcaaggcgatcataggcatgttggtgcttgcgatgtcggcgtggcggaatgactggctcgccgccttgatcaagaatgatgtcatgcaagttgtcggcatcataggcgcgatccgcgagcacctgtttggctggcagagcgcggataaggtcgcaagccggtgccatgtcgttttgttgaccagggccgagttgaaagcgaaccggcaatcccagtgcatcgactaccgcatggattttgctgccaaatccacctcgggagcggccgagagcctgggcttgcgctcccccctttttcgccgcccgccggcggcttgggcctgcgcccggataaccgtggcgtcgatggacaaccactccatgtccggatcgacagaaactgcttcgaaaatccggtcgaatatgccctgctcgatccaacggtaatagcgccgtttgaccgtctgataggggccgaaacggtcttccggcagatcacgccagcgcgctccggaccgggcaagccacagtatcgcgtcgaagaaccggcgcccatcactgcgaggaccgcgcctgcctttacgaccaccgggcacaaacggcttcagccgctcccactggtcatctcgaagaacctcaccatccatcgccgacctccaaaagtcagccttgaatctgatttgcgactcgaatggaatcccggatcgttaatttgtcaccacagccta

SEQ ID NO: 81 - DNA, 855 bp, Rhizobium matallidurans
  source 1..855: mol_type = genomic DNA
ctagggcgtagactcataacgacctgatccagatgcgggtggcgagtagttttacggctgctaggaagttttgagggtccttgtcatatcgagtggcaatccctctgaactgcttgagcttgttgaagaatcgctcgacgaggtttcgctgcctatagacccatgagctgaacggaaagctctccttgcggtttcgctttgctggaatattggcccacgcccgttttgtttttgccaaggttcgaaggtcgtttgtatcataagccctgtctgccaaaagtatggcaccctttccgatatccttcagcattggctcggcggccctgctgtcgtgcacttgtcctggggtcaggtcgatgccaattggacggccatctgcatcgacaagagcatggattttcgtcgtcaagccgccgcgggaacgtcccatgcagccatcgtcttgatccccctttttcccgtggccgcatgttgatgaacgcggacacaggaactgtcgatcatgacaatatcgccgtcgaaggcccttgagacctcctgcagaacatggtcccagacaccagcctttctccaacggacaaaacgattgtagcaggttgtgtaggggccatagcgctcaggaacatccgcccagggcgagccggtccgaaatcgccacaagatgccgttgattacgcgccggtcgtcaactcgcgggacgccgcgaggcttgttaggaagaagcggttggataatgctccattcgaaatcagtcaggtcgaaccggcgacgggtcatctgaggcctccaaatcaaagcctcattgaatcaaagccatgcccgcgtgtgaaccccgtttatgagtgtagggcctag

SEQ ID NO: 82 - DNA, 848 bp, Rhizobium matallidurans
  source 1..848: mol_type = genomic DNA
cgcaaacctcacggcggctttgttcggaatgaggatcgcgaaatcggcatcgtggcgcacggtgcccgcaagctcgccggccgcgtcaccggagccggtgaaaatatcgccgcgcgcagggccaacgatggccgaaccggtgtcgagcgccagcatcaggcgctggaagggctttccgccctgcaaatgcaggaggccttgcgactggatgtagaacggaaagccgaaggtgtggatcatgcgatcgacggccagcgaccgccctgcgatcaacggtaccttggcggccgcgaccgggccggcagcctcgttgtcgacctcgacctcgcggaagaaaatgtaggatcggttgtgcgcgaggatgtcgtcgacgcggtcgggattagtcgccagccaatgccggatcgattgcatagagatgctcgcccggtcgatctcgccgagatcgatcagcagtttgccgatcgccgagaatggatggccggcctttgccgcataggtgatgcgccccgtgcggccgtcgggataacgcaggcgcgcggcgccctggacatgcacgaagaagacatcgaccttcgatttcgcccaggcgatctccagcccctgcccttccagcgcacccttgtcgatggcggcacggtcgagataatgcccgaccgttccctcacgcaatcggccgaacatgtagctcgtatccatcgtggcggggcggttctgatcgtcgaggtcgatgaggtcatcagggcggcggtagaacgggaaccggtattcgtcgtcgggcgcagatgaaacagctatctcgggctcgtaaaaggcagtgacgaaaccgggctcgccgtcggttcgcc

SEQ ID NO: 83 - DNA, 846 bp, Rhizobium matallidurans
  source 1..846: mol_type = genomic DNA
cctaggacgtggactcgcaaactgaattgatccaaattcgtgtcgcaacgagtttcagtgcagcaaggtaattgtcagggcgacggtcgtagcgcgtggccaggccccgcatgtgtttgatacgattgaagaacctctccacttggtttcgctgcctatagacccagcgactgaagctgaagctctgcttccgatttatctttgttgggatgttagcccaagccttgcggcctttcacaaacgctcggatcgcatccgtgtcatacgctttatctgcaagtagcgtcgtgcctggttcgatgtcagatatcagcctctcagcgaccggagcatccgctgcctggcctgctgtcagctccattcgtaacggtcggccatccgcatcgaccatggcatggattttggtcgtcaggccgccgcgcgaacgtcccatgcaaggatcggtagagcccccttttttgcgttggcaccatgctggtgaacgcgcacacacgacgagtcgatcataactatatcgccgtcgtaacgccttgataccgcttcaagaagtcggtcccaaacgccggctttacgccagcgcgagaaccgattgtaaagtgtagtacgagggccgtagcgctcagggatatcccgccaagagcagccagttctgaaacgccacaaaatgccattgatcacccggcggtcatcaacacgttcgacaccacggctcttattcggcaaaagtggtgcgataatcgcccactcttcatcgctaagttcatgacggcgcatatcaatctccttccaaggacattgaatcatcatcctgactaaagcgaaaccctttaatggggacgcgaccta

SEQ ID NO: 84 - DNA, 669 bp, Rhizobium matallidurans
  source 1..669: mol_type = genomic DNA
tcacatatttcggcgtccattcggtctgtcgggtgaggattgtgttggcgagaatgacgagtttgcgggccaccgcgatgaccgcgcacaggtgctccttgccgttgccgcgcaaccgcttgtagaaggccgcgagatccggattgtgccggctggcggtgaaggcgcacatgaaaaggctcttgcgcagccgttcgcgaccgccctggatccggcgcctgccgcgatgcttgccgctgtcgtcatcatagggtgcgacaccggcaagggcggcgacctcgttgcggccggcatggccgagttcgggcatgcggatgacgaggcacagcgcgctgcgcattccgatccccttgatggagaccagaaggtcgagccgccgcgccagatcggggtcgccgcgaaccagcttttcgagccgaagcatatgcgcattgcgacaggtctcgagcctggcgatttcgtgggagtggcggcgcttgacgatctcaggcacggcggtctcggcgaatgtcttcaccagcgcgatctgctgttcgatctgctccagataggtcagttcggccgaaagccggtcgaagcgggcatcgggcagcgccggcagcgtcttcaggctggcggtgaagacggcaatcagcgtggcgtccagccggtcgttcttggcccgctgca

SEQ ID NO: 85 - DNA, 642 bp, Rhizobium matallidurans
  source 1..642: mol_type = genomic DNA
aaggcggatgccgtctgcttcacgcccttcaacaagaaggcgatgcgctacgcctatcccggctatgacgacgagatccgcttcgtctgcgacgtgctgtcgttcaagggcaaggtccgggaattcaacgttctggaaaaggtctggaatgcgcgtgtcagctcgcatatcccgctgaaggacgtggccgcccatctttcggtcgatggcatcctgtccgaactggaactgacgctttcttgcctgaaggcatcgggcatcgcatcgcccaaggtcgcggtcgccggcctcaatccgcatgcgggcgatggcggcagtttcggcatggaagagatcgacatcatcgagccggcggtcgcggccgccaaggcgcgcggcctcgatgtcgaaggtccgttcccggctgatacggtgtttctgcgggcgcttaaggaaggcttcaacgcggtgctgacgatgtaccacgaccagggccagatcgccatgaagctgatgggcttcgacaagggcgtgacgatgatgggcggcctgccgttcccgctctgcacgcctgcgcatggcacggcctacgatatcgccggcaagggcatcgccgatgtcggcgccagccgcgaagccatcctgcttgccgcacgcatggca

SEQ ID NO: 86 - DNA, 590 bp, Rhizobium matallidurans
  source 1..590: mol_type = genomic DNA
gccgatcgagaaaggctttgaccttgtcatcgatctcttcgcacaggcgggaaacctggctctttgagatgccgctcatccccatggccttgacgagatcatcaacggaacgcgtcgagatgccctgaatgtaagcttcctggataacagctgtcagcgccttctcggccatgcggcgtggctcgaggaaggttgggaagtaagaccctttacgcagctttgggatacgcagctctaccgtacctgcacgggtctcccagtcacggtcgcgataaccgttgcgttgcgccaatcgtgatgggctcttctcaccgtgggccgcgccagttgcagcgctaacttccaattccatcagtcgctcagcagcaaaaccgatcatgtcgcgcagaatatccgcgtccggggtcttctccacgagcttgcgtaggtccattatgtcgttggtcatcgatgtatccttcgtatctggttgagtgtcagcaacccaaccataccggagattatcgatgaccgcccgcaaagccgctcactcgctacagcgcgctaagggcgcgctcgcgagcggctttgctaccgtcgacttacaccac

SEQ ID NO: 87 - DNA, 545 bp, Rhizobium matallidurans
  source 1..545: mol_type = genomic DNA
aaggtgttggccccgtccgtcccaatcctgttcggcgacaacaagggttcatctttaagcatctttcggaagaaccgcttggcagcgtcgagatcgcgcttagcggtcagcaggaaatccaccggattgccatgcttatcgatggctcggtacagatagcgccatttgccgcggatcttgacataggtctcatcaatccggaccgagccgcaatggggtcgacgaaactgccgcagccgtttctcgatgacaggtgcataagccaatacccagcggttgatcgtgctatgatcgacctcgaagccccgctcgcgaaacatctcttccaagtcacgatagctgagcgggtagcgcaagtaccaggcaaccgcctgtacaatcagccaggcctcgaaatgcctgcccttgaaatcatccttcgactggcgcttcagcttttcggcaatggtattcaaaatcatcggctcgctccgcaatatcaggagcggcaacttctctccccatggtcaacatcgagttaacctgaagaatttgcgacaaggccc

SEQ ID NO: 88 - DNA, 542 bp, Rhizobium matallidurans
  source 1..542: mol_type = genomic DNA
ggcagcggcggcggacgggccgaagacggcgaaaccctcggcgcgcagacgatcggcaacacccgccaccagcggcgcttccgggccgacgacgacgaagtcgatcgcattgtccttgcagaaggcgacgacggcgtcgttgtcctcggtgttgacggcgacaagcgtcgcgtgctcggcgatgcccggattgccgggggcggcgtagagcctggtgagttcgggcgattgcgccagcttccaggccaatgcgtgctcgcgtccgcccgatccgatcaacagaaccttcatgcccgtccctttccagtttgtgtgtggcggttaagcggctggagcggaaaggtcaagcaggaatggggttgtgcggtggttgaggccccctcatccgacccttcgggccaccttctccccctatggggcgaagggaagattggcgcgagcggcccgctccgaatctcttctccccaacggggagaaggtgccggcaggcggatgagggggccacaccgactgcccatccaatccatcttaatcctaccaac

SEQ ID NO: 89 - DNA, 532 bp, Rhizobium matallidurans
  source 1..532: mol_type = genomic DNA
gatcgtgtcccatgagatggtgtaagtgccgacgaggccaccgtgctctccggcaaggccgggaggatcaacgtgccacggctggcaagctgatgattggatcatcgctcattttgccgatggtttctactgtcatgtagcgcgaccgttgcaccgcccactcgtcattttgctcaaggagcatcgcaccgacgagcctgacaatggcgtcttcgttcgggaagatgccgacgacatccgtccgcttcttgatttctccattgagacgttcgatgggattcgtggagtgaagcttcgtccagtgttgcttcggaaaactcatataggccaggacatcgtgctcggcctcatccatgatcgcagcgagtttgggcactttagggcggatttgatcggcgacattgcgccattggctgcttgcggcctccggggtctcctgggcgaaagctgttccgatgaaggcggaaacaacccgcctgccactcttgcctgcatgggccagcacattgcgggcgaagtggacccggcatct

SEQ ID NO: 90 - DNA, 453 bp, Rhizobium matallidurans
  source 1..453: mol_type = genomic DNA
cggtcttctgcatcaccaaatacaagacctatgtgtgccgccgagcgtttcacgccgaatattcgagggcgatcgcggcctcgcccgatcttgccgcgttcgaacatgtcgaaaccgagtttctcgggtcaaaggcggcgcggctggaaaatccgatgcgtcggcggctcgtgcaccagcttctagtgcgcagcggcatgggcgtgttttcggagcgagcctatcgatagccggcttgcggcgttcagggcgatagaaagaaaaatgcctcgccgaagcgaggctagtccaaggccgcttcggggaaaacggaagcgacgcggctgttttattgctacgctaactttgcgcaagcgcagtttggcgaatttcggtacgcccggcgaaatcgaatggagcgacgatcaggaccggcggccatcgctcttcaagcccgcaacaagccggcgacca

SEQ ID NO: 91 - DNA, 374 bp, Rhizobium matallidurans
  source 1..374: mol_type = genomic DNA
acggtggttgtgtcaaactcgatcgcacacttcaagaatgcgcccccgctcgggcccaactctgaccgtcccacaacccgagcatccatgacgcctctcctggaaacatgaaaacgtatcgacgcaggctgtgacgcagcatcgtacggctcttttccgggggcgctggcacgacgacaatctaacccttagttgagtgtgatgtaactatcgtttgcggaatgggagacgtatcgccgtgggacgcaagcaaacactcgtgcagccggaacctgccctccttgtcgccgacgcgttatggtagcattcgaggcgcgggagcgcgagacgacaagacgtttgggccacggcggatgcttggaggcgatccatcc

SEQ ID NO: 92 - DNA, 287 bp, Rhizobium matallidurans
  source 1..287: mol_type = genomic DNA
ctgccagctagcgcacaggaccttggagacggcagccttgatgccctcgtgggcatcggagatgaccaacttaacgccgcgtaggcctcgtcgcgtcagcttgcgcaagaactctgtccagatcggctcagcttctgaggtcccgacctccataccgaggacttctcgtcgaccatcggtgttgacgcccaccgcgatgatggcggcaacagagatgatgcgaccaccgcgccgcactttgaggtaggtgccgtccacccacaagtacggccagtcgccctcgattg

SEQ ID NO: 93 - DNA, 274 bp, Rhizobium matallidurans
  source 1..274: mol_type = genomic DNA
catcatgctcttgaagaaaggcgtcgagccgcttcaggcccgccgcgtcgtaggtgacccgcagccgcgcgtcaccgggatggatggcgatgtcgagatggcttttgccgacatcgattccggcacagatcatgctatcatcggtcatcttcgtcgtccctgtcttggatacgaaccccaaggttcctgcaaccacacgggcctgatgaagagccggttgcgatcctgctccccacagcccctgacggctgagaaggtgacgatccgacaacca

SEQ ID NO: 94 - DNA, 246 bp, Rhizobium matallidurans
  source 1..246: mol_type = genomic DNA
taaggtgggtttccccattcggatatccatggatcaaagcttattcgcagctccccacggcttttcgcagcgtatcacgtccttcatcgcctgtgcatgccaaggcatccaccaaatgcccttacgacacttaatcgttctcattgccaatgctcatcagttagctcagcattcccagaggaatgcgaaagcaacgcggttaccttttacaaccgcgtcatctcatgatgccatcgacgtgttcga

SEQ ID NO: 95 - DNA, 220 bp, Rhizobium matallidurans
  source 1..220: mol_type = genomic DNA
tgccgcgcgacgatcaacgtggaattcgagcgacaatcaggatgggactttgcgggtggtgggcgtaacggagtgagggcgtagcccgatcgaagttatgcccaccacccgtggcgcaaattcaggcatgccttgcgcctgtgatcgcggtcaatctggcgattttccataaccggagaatcactttgtgccaggtcgccatgtaaacgatcatcaaatg

SEQ ID NO: 96 - DNA, 189 bp, Rhizobium matallidurans
  source 1..189: mol_type = genomic DNA
acctagaaacctgtttccgttgcaccgcctcacccggacaaaccgggtgtcttttgtcctcacggcccaaagggcctgcggacggcgcgccaaacgattggcgacggcctctggcctgtatgggaagtcccacacaatccaacagccatccaaacgcttggtttcaacagaacagattttctaggtatc

SEQ ID NO: 97 - DNA, 173 bp, Rhizobium matallidurans
  source 1..173: mol_type = genomic DNA
gtggcattcgccactttctatttttgaacacgtctttctcttcatcgtctgtgcggatgcgtgtggcacccatacaggccagaggccgtcgccaatcgtttggcgggccgtccgcagcgcgttagcgcgtcaggacaagagatgatgcatcatcgaagcgcccttggcgcttt

SEQ ID NO: 98 - DNA, 148 bp, Rhizobium matallidurans
  source 1..148: mol_type = genomic DNA
gcagacctggcagcgaccgactctcccgcgtcttaagacgaagtaccataggcgcaggggcgtttcacggccgtgttcggaatgggaacgggtgcagccgccccgccataaccaccaggtcagcgaagcgcaacaattgagaagctgg

SEQ ID NO: 99 - DNA, 134 bp, Rhizobium matallidurans
  source 1..134: mol_type = genomic DNA
tgaggcctgtcaggcctcgttttgtcttgaacacgtctcaggcgacaaccggccgaacactgcgtgttcgccgggcccgtatcgcaaaggcttcgccttcgctctgtcaggccaagcgcttcgcgcttgccttg
